(19) United States
(12) Patent Application Publication
(10) Pub. No.: US 2025/0282866 A1
(43) Pub. Date: Sep. 11, 2025

(54) TREATMENT OF DISEASES RELATED TO ATP-BINDING CASSETTE TRANSPORTER 1 DYSFUNCTION USING TREM2 AGONISTS

(71) Applicant: VIGIL NEUROSCIENCE, INC., Watertown, MA (US)

(72) Inventors: Spyridon PAPAPETROPOULOS, Watertown, MA (US); Richard FISHER, Watertown, MA (US); Matthew BRENNAN, Watertown, MA (US)

(21) Appl. No.: 18/984,651

(22) Filed: Dec. 17, 2024

Related U.S. Application Data
(62) Division of application No. 17/457,727, filed on Dec. 6, 2021, now abandoned.
(60) Provisional application No. 63/121,404, filed on Dec. 4, 2020.

(51) Int. Cl. C07K 16/28; A61K 31/739; A61K 38/17; A61P 25/00

(52) U.S. Cl. CPC C07K 16/2803; A61K 31/739; A61K 38/1709; A61P 25/00; C07K 2317/24; C07K 2317/75

(57) ABSTRACT

The present invention provides a method of treating a disease or disorder caused by and/or associated with ABCD1 dysfunction in a human patient, the method comprising administering to the patient in need thereof an effective amount of a compound that increases the activity of triggering receptor expressed on myeloid cells 2 (TREM2). In some embodiments, compound that increases the activity of TREM2 is an agonist of TREM2. In some embodiments, the agonist of TREM2 is a small molecule agonist of TREM2 or an antibody agonist of TREM2.

### CROSS REFERENCE TO RELATED APPLICATIONS

[0001] This application is a divisional of U.S. application Ser. No. 17/457,727, filed Dec. 6, 2021, which claims priority benefit of U.S. Provisional Application No. 63/121,404, filed Dec. 4, 2020, each of which is hereby incorporated by reference in its entirety.

### REFERENCE TO SEQUENCE LISTING

[0002] The instant application contains a Sequence Listing which has been submitted electronically in ASCII format and is hereby incorporated by reference in its entirety. Said ASCII copy, created on Dec. 17, 2024, is named 2024-12-17-Sequence-Listing-5258.0070003.txt and is 2,755,362 bytes in size.

### TECHNICAL FIELD OF THE INVENTION

[0003] The present invention relates to compounds and methods of use thereof for treating diseases and disorders caused by ATP-binding cassette transporter 1 (ABCD1) dysfunction.

### BACKGROUND OF THE INVENTION

[0004] Microglia are brain-resident macrophages with many homeostatic and injury responsive roles, including trophic and phagocytic functions. Microglia are highly dependent on peroxidation for maintaining normal function. The ATP-binding cassette transporter 1 (ABCD1) gene encodes a key peroxisomal protein responsible for transport of activated very long chain fatty acids (VLCFA) into the peroxisome for further degradation and beta-oxidation for energy production. Therefore, mutations in the ABCD1 gene can lead to microglial dysfunction and damage due to accumulation of VLCFA, resulting in neurological and adrenal gland diseases and disorders. X-linked adrenoleukodystrophy (X-ALD) is one such condition associated with ABCD1 mutations, characterized by cerebral and spinal cord white matter degeneration with demyelination and adrenal insufficiency, which lead to progressive cognitive and motor dysfunction and ultimately death. To date, there are no known treatments for diseases and disorders caused by ABCD1 dysfunction, and patients are usually treated by managing the symptoms of the disease. Therefore, there remains a need in the art for methods of treating diseases and disorders caused by ABCD1 loss of function mutations.

### SUMMARY OF THE INVENTION

[0005] In one aspect, the present invention provides a method of treating a disease or disorder caused by and/or associated with a dysfunction in ABCD1 in a human patient, the method comprising administering to the patient an effective amount of a compound that increases the activity of triggering receptor expressed on myeloid cells 2 (TREM2). In some embodiments, the compound that increases the activity of TREM2 is an agonist of TREM2. In some embodiments, the agonist of TREM2 is a small molecule agonist of TREM2 or an antibody agonist of TREM2. In some embodiments, the disease or disorder caused by and/or associated with a dysfunction in ABCD1 is x-ALD.

### DETAILED DESCRIPTION OF CERTAIN EMBODIMENTS

### TREM2, ABCD1 and X-ALD

[0006] TREM2 is a member of the Ig superfamily of receptors that is expressed on cells of myeloid lineage, including macrophages, dendritic cells, and microglia (Schmid et al., Journal of Neurochemistry, Vol. 83: 1309-1320, 2002; Colonna, Nature Reviews Immunology, Vol. 3: 445-453, 2003; Kiialainen et al., Neurobiology of Disease, 2005, 18: 314-322). TREM2 is an innate immune receptor that binds many endogenous substrates, and signals through a short intracellular domain that complexes with the adaptor protein DAP12, the cytoplasmic domain of which comprises an ITAM motif (Bouchon et al., The Journal of Experimental Medicine, 2001, 194: 1111-1122). Upon activation of TREM2, tyrosine residues within the ITAM motif in DAP12 are phosphorylated by the Src family of kinases, providing docking sites for the tyrosine kinase ξ-chain-associated protein 70 (ZAP70) and spleen tyrosine kinase (Syk) via their SH2 domains (Colonna, Nature Reviews Immunology, 2003, 3:445-453; Ulrich and Holtzman, ACS Chem. Neurosci., 2016, 7:420-427). The ZAP70 and Syk kinases induce activation of several downstream signaling cascades, including phosphatidylinositol 3-kinase (PI3K), protein kinase C (PKC), extracellular regulated kinase (ERK), and elevation of intracellular calcium (Colonna, Nature Reviews Immunology, 2003, 3:445-453; Ulrich and Holtzman, ACS Chem. Neurosci., 2016, 7:420-427). The wild-type human TREM2 amino acid sequence is provided as SEQ ID NO: 1.

[0007] TREM2 has been implicated in several myeloid cell processes, including phagocytosis, proliferation, survival, and regulation of inflammatory cytokine production (Ulrich and Holtzman, ACS Chem. Neurosci., 2016, 7: 420-427). One of the key TREM2 functions is regulating myeloid cell number. Knocking down expression of TREM2 in primary microglia using translation blockers leads to reduced cell number (Zheng, et al., Neurobiol. Aging, 2016; 42: 132-141). Evidence suggests that in various contexts, TREM2 is important for myeloid cell survival, proliferation and chemotaxis, all of which could lead to disease-associated increases in myeloid cell number including microglia (Jay, et al., Mol Neurodegener. 2017; 12(1):56).

[0008] A well-characterized function of TREM2 is to enhance phagocytosis. TREM2 is expressed in a subset of myeloid cells within the CNS that have high phagocytic capacity (Bisht et al., Glia. 2016; 64: 826-839). Across numerous in vitro studies, loss of TREM2 results in reduced phagocytosis of a variety of substrates, including apoptotic neurons or neuronal cell lines (Takahashi et al., Exp Med. 2005; 201(4):647-657.; Hsieh et al., J Neurochem. 2009; 109(4): 1144-1156). Conversely, TREM2 activation or overexpression enhanced uptake of these substrates (Takahashi et al., J Exp Med. 2005; 201(4):647-657; Takahashi et al., PLoS Med. 2007; 4(4):e124; Jiang et al., Neuropsychopharmacology. 2014; 39(13): 2949-2962.). TREM2 is important for clearance of myelin debris in experimental autoimmune encephalomyelitis (EAE) (Takahashi et al., PLoS Med. 2007; 4(4):e124) and peri-infarct tissue in mice following middle coronary artery occlusion (MCAO) (Kawabori et al., J Neurosci. 2015; 35(8): 3384-3396).

[0009] TREM2 has been classically described as being anti-inflammatory and several in vitro and in vivo studies are supportive of an anti-inflammatory role for TREM2 in certain contexts (Yin et al., Traffic. 2016; 17(12): 1286-1296). Knocking down TREM2 in cell lines increases levels of proinflammatory mediators such as iNOS, TNFα, IL1β and ILδ (Yin et al., Traffic. 2016; 17(12): 1286-1296) in response to apoptotic neuronal membrane debris (Takahashi et al., J Exp Med. 2005; 201(4):647-657.), TLR ligands (Turnbull et al., J Immunol. 2006; 177(6):3520-3524.), including LPS (Gawish et al., FASEB J. 2015 Apr; 29(4):1247-1257.; Gao et al., Mol Med Rep. 2013 March; 7(3):921-926.; Takahashi et al., PLoS Med. 2007; 4(4):e124.) and Aβ42 (Jiang et al., Neuropsychopharmacology. 2014; 39(13): 2949-2962.). Moreover, overexpressing TREM2 in cell lines or amyloid (Jiang et al., Neuropsychopharmacology. 2014; 39(13): 2949-2962.) and tau mouse models of AD (Jiang et al., Neuropharmacology. 2016; 105:196-206.) reduced levels of these pro-inflammatory transcripts. Together, these studies suggest that in some contexts, TREM2 can attenuate inflammatory responses.

[0010] TREM2 has been linked to several serious diseases. For instance, mutations in both TREM2 and DAP12 have been linked to the autosomal recessive disorder Nasu-Hakola Disease, which is characterized by bone cysts, muscle wasting and demyelination phenotypes (Guerreiro et al., New England Journal of Medicine, 2013, 368: 117-127). Variants in the TREM12 gene have been linked to increased risk for Alzheimer's disease (AD) and other forms of dementia including frontotemporal dementia and amyotrophic lateral sclerosis (Jonsson et al., New England Journal of Medicine, 2013, 368:107-116; Guerreiro et al., JAMA Neurology, 2013, 70:78-84; Jay et al., Journal of Experimental Medicine, 2015, 212: 287-295; Cady et al., JAMA Neurol. 2014 April; 71(4):449-53). Impairment in microgliosis has been reported in animal models of prion disease, multiple sclerosis, and stroke, suggesting that TREM2 may play an important role in supporting microgliosis in response to pathology or damage in the central nervous system (Ulrich and Holtzman, ACS Chem. Neurosci., 2016, 7: 420-427).

[0011] The ABCD1 gene provides instructions for producing the adrenoleukodystrophy protein (ALDP). ABCD1 (ALDP) maps to Xq28. ABCD1 is a member of the ATP-binding cassette (ABC) transporter superfamily. The superfamily contains membrane proteins that translocate a wide variety of substrates across extra- and intracellular membranes, including metabolic products, lipids and sterols, and drugs. ALDP is located in the membranes of cell structures called peroxisomes. Peroxisomes are small sacs within cells that process many types of molecules. ALDP brings a group of fats called very long-chain fatty acids (VLCFAs) into peroxisomes, where they are broken down. As ABCD1 is highly expressed in microglia, it is possible that microglial dysfunction and their close interaction with other cell types actively participates in neurodegenerative processes (Gong et al., Annals of Neurology. 2017; 82(5):813-827.). It has been shown that severe microglia loss and damage is an early feature in patients with cerebral form of X-linked ALD (cALD) carrying ABCD1 mutations (Bergner et al., Glia. 2019; 67: 1196-1209). It has also been shown that ABCD1-deficiency leads to an impaired plasticity of myeloid lineage cells that is reflected in incomplete establishment of anti-inflammatory responses, thus possibly contributing to the devastating rapidly progressive demyelination in cerebral adrenoleukodystrophy (Weinhor et al., BRAIN 2018: 141; 2329-2342). It has also been shown in a recent report of 83 young males with cALD that patients harboring the APOE4 allele, a known ligand of TREM2, have an increased burden of cerebral disease involvement as determined by Loes score, gadolinium intensity score (GIS), and neurologic function score (NFS) (Orchard et al., Nature Scientific Reports 2019 9:7858). These findings emphasize microglia/monocytes/macrophages as crucial therapeutic targets for preventing or stopping myelin destruction in patients with X-linked adrenoleukodystrophy.

[0012] The present invention relates to the unexpected discovery that administration of a TREM2 agonist can rescue the loss of microglia in cells having mutations in the ABCD1 gene. It has been previously shown that TREM2 agonist antibody 4D9 increases ATP luminescence (a measure of cell number and activity) in a dose dependent manner when the levels of M-CSF in media are reduced to 5 ng/mL (Schlepckow et al, EMBO Mol Med., 2020) and that TREM2 agonist AL002c increases ATP luminescence when M-CSF is completely removed from the media (Wang et al, J. Exp. Med.; 2020, 217(9): e20200785). This finding suggests that TREM2 agonism can compensate for deficiency in ABCD1 function leading to sustained activation, proliferation, chemotaxis of microglia, maintenance of anti-inflammatory environment and reduced astrocytosis caused by a decrease in ABCD1 and accumulation of VLCFAs. The present invention relates to the unexpected discovery that activation of TREM2 can rescue microglia harboring the ABCD1 mutation and challenged with an increase in VLCFA, and that this effect may be also observed in patients suffering from loss of functional microglia due to ABCD1 mutation. This discovery has not been previously taught or suggested in the available art.

[0013] To date, no prior study has shown that TREM2 agonism can rescue the loss of microglia in cells where mutations in the ABCD1 and a VLCFA increase is present. No prior study has taught or suggested that reversal of the loss of microglia due to an ABCD1 mutation through TREM2 agonism can be used to treat a disease or disorder caused by and/or associated with an ABCD1 mutation.

[0014] X-linked adrenoleukodystrophy (x-ALD) is an X chromosome-linked central nervous system disease caused by an ABCD1 mutation that manifests in the form of variable developmental behavioral, cognitive, motor and sensory function changes in patients suffering from the disease. Three main phenotypes are seen in affected males: (1) The childhood cerebral form manifests most commonly between ages four and eight years. It initially resembles attention-deficit disorder or hyperactivity; progressive impairment of cognition, behavior, vision, hearing, and motor function follow the initial symptoms and often lead to total disability within six months to two years and death within 5 years. (2) Adrenomyeloneuropathy (AMN) manifests most commonly between the second and fourth decades as progressive stiffness and weakness of the legs, sphincter disturbances, sexual dysfunction, and often, impaired adrenocortical function; all symptoms are progressive over decades. (3) “Addison disease only” presents with primary adrenocortical insufficiency between age two years and adulthood and most commonly by age 7.5 years, without evidence of neurologic abnormality. The cerebral childhood form of x-ALD also know as cerebral ALD (cALD) is characterized by patchy cerebral white matter abnormalities visible by magnetic resonance imaging. However, the clinical symptoms and MRI changes are not specific to cALD and are common for other neurological conditions, including Adult-onset leukoencephalopathy with axonal spheroids and pigmented glia (ALSP), Nasu-Hakola disease (NHD) and other leukodystrophies, making diagnosis and treatment of cALD very difficult.

[0015] Studies have discovered that x-ALD is a genetic disorder in which male patients that carry a loss of function mutation in the peroxisomal transporter gene ABCD1, leading to VLCFA increase and activation of inflammatory processes leading to demyelination and axonal degeneration. In one aspect, the present invention relates to the surprising discovery that activation of the TREM2 pathway can rescue the loss of microglia in patients carrying ABCD1 mutations, preventing microglia apoptosis, thereby treating ABCD1-related conditions, such as, but not limited to, x-ALD.

[0016] The present invention also relates to the surprising discovery that neurofilament light chain and neurofilament heavy chain proteins can serve as a therapeutic biomarker to determine treatment efficacy in patients suffering from a disease or disorder caused by and/or associated with a ABCD1 dysfunction, such as x-ALD. Neurofilament light chain (NfL) is highly elevated in the plasma, serum and CSF of patients with x-ALD, (van Ballegoij, et al., Ann Clin Transl Neurol, 7: 2127-2136.). cALD is characterized by severe and rapid myelin breakdown followed by neurodegeneration. Mice exposed to cuprizone, a model of acute demyelination, show elevations in plasma NfL (Taylor Meadows et al, European Charcot Foundation 25th Annual Meeting; November 30-Dec. 2, 2017; Baveno, Italy). Additionally, TREM2 knockout mice exposed to cuprizone show increased neurotoxicity and further increases in plasma and CSF NfL (Nugent et al, Neuron; 2020, 105(5): 837-854; O'Loughlin et al, Poster #694 ADPD Symposium, Lisbon Portugal, April 2019.). Patients with cALD have quantitatively fewer microglia than healthy individuals in multiple regions of the brain (Bergner et al., Glia. 2019; 67(6):1196-1209). The present invention relates to the unexpected discovery that neurofilament is broken down in the neurons of animals suffering from a disease or disorder caused by and/or associated with a ABCD1 dysfunction, such as x-ALD, resulting in an increase in neurofilament breakdown products in the plasma, serum and cerebral spinal fluid (CSF), and that efficacy of treatment of the dieasese or disorder with a TREM2 agonist can be determined by measuring central levels of neurofilament and central nervous system (CNS), plasma and serum levels of its degradation products, namely neurofilament light chain and neurofilament heavy chain proteins. In one aspect, the present invention provides methods for selecting x-ALD patients that are likely to experience progression of their neurodegenerative or other disease phenotypes based on neurofilament light chain or neurofilament heavy chain levels, thereby informing the timing of treatment with a TREM2 agonist.

### Definitions

[0017] Unless defined otherwise, all technical and scientific terms used herein have the same meaning as commonly understood by one of ordinary skill in the art. Accordingly, the following terms are intended to have the following meanings.

[0018] “Agonist” or an “activating” agent, such as a compound or antibody, is an agent that induces (e.g., increases) one or more activities or functions of the target (e.g., TREM2) of the agent after the agent binds the target.

[0019] “Antagonist” or a “blocking” agent, such as a compound or antibody, is an agent that reduces or eliminates (e.g., decreases) binding of the target to one or more ligands after the agent binds the target, and/or that reduces or eliminates (e.g., decreases) one or more activities or functions of the target after the agent binds the target. In some embodiments, antagonist agent, or blocking agent substantially or completely inhibits target binding to one or more of its ligand and/or one or more activities or functions of the target.

[0020] “Antibody” is used in the broadest sense and refers to an immunoglobulin or fragment thereof, and encompasses any such polypeptide comprising an antigen-binding fragment or region of an antibody. The recognized immunoglobulin genes include the kappa, lambda, alpha, gamma, delta, epsilon and mu constant region genes, as well as myriad immunoglobulin variable region genes. Light chains are generally classified as either kappa or lambda. Heavy chains are classified as gamma, mu, alpha, delta, or epsilon, which in turn define the immunoglobulin classes, IgG, IgM, IgA, IgD and IgE, respectively. Immunoglobulin classes may also be further classified into subclasses, including IgG subclasses IgG₁, IgG₂, IgG₃, and IgG₄; and IgA subclasses IgA₁ and IgA₂. The term includes, but is not limited to, polyclonal, monoclonal, monospecific, multispecific (e.g., bispecific antibodies), natural, humanized, human, chimeric, synthetic, recombinant, hybrid, mutated, grafted, antibody fragments (e.g., a portion of a full-length antibody, generally the antigen binding or variable region thereof, e.g., Fab, Fab′, F(ab′)2, and Fv fragments), and in vitro generated antibodies so long as they exhibit the desired biological activity. The term also includes single chain antibodies, e.g., single chain Fv (sFv or scFv) antibodies, in which a variable heavy and a variable light chain are joined together (directly or through a peptide linker) to form a continuous polypeptide.

[0021] “Isolated” refers to a change from a natural state, that is, changed and/or removed from its original environment. For example, a polynucleotide or polypeptide (e.g., an antibody) is isolated when it is separated from material with which it is naturally associated in the natural environment. Thus, an “isolated antibody” is one which has been separated and/or recovered from a component of its natural environment.

[0022] “Purified antibody” refers to an antibody preparation in which the antibody is at least 80% or greater, at least 85% or greater, at least 90% or greater, at least 95% or greater by weight as compared to other contaminants (e.g., other proteins) in the preparation, such as by determination using SDS-polyacrylamide gel electrophoresis (PAGE) or capillary electrophoresis- (CE) SDS under reducing or non-reducing conditions.

[0023] “Extracellular domain” and “ectodomain” are used interchangeably when used in reference to a membrane bound protein and refer to the portion of the protein that is exposed on the extracellular side of a lipid membrane of a cell.

[0024] “Binds specifically” in the context of any binding agent, e.g., an antibody, refers to a binding agent that binds specifically to an antigen or epitope, such as with a high affinity, and does not significantly bind other unrelated antigens or epitopes.

[0025] “Functional” refers to a form of a molecule which possesses either the native biological activity of the naturally existing molecule of its type, or any specific desired activity, for example as judged by its ability to bind to ligand molecules. Examples of “functional” polypeptides include an antibody binding specifically to an antigen through its antigen-binding region.

[0026] “Antigen” refers to a substance, such as, without limitation, a particular peptide, protein, nucleic acid, or carbohydrate which can bind to a specific antibody.

[0027] “Epitope” or “antigenic determinant” refers to that portion of an antigen capable of being recognized and specifically bound by a particular antibody. When the antigen is a polypeptide, epitopes can be formed from contiguous amino acids and/or noncontiguous amino acids juxtaposed by tertiary folding of a protein. Linear epitope is an epitope formed from contiguous amino acids on the linear sequence of amino acids. A linear epitope may be retained upon protein denaturing. Conformational or structural epitope is an epitope composed of amino acid residues that are not contiguous and thus comprised of separated parts of the linear sequence of amino acids that are brought into proximity to one another by folding of the molecule, such as through secondary, tertiary, and/or quaternary structures. A conformational or structural epitope may be lost upon protein denaturation. In some embodiments, an epitope can comprise at least 3, and more usually, at least 5 or 8-10 amino acids in a unique spatial conformation. Thus, an epitope as used herein encompasses a defined epitope in which an antibody binds only portions of the defined epitope. There are many methods known in the art for mapping and characterizing the location of epitopes on proteins, including solving the crystal structure of an antibody-antigen complex, competition assays, gene fragment expression assays, mutation assays, and synthetic peptide-based assays, as described, for example, in Using Antibodies: A Laboratory Manual, Chapter 11, Harlow and Lane, eds., Cold Spring Harbor Laboratory Press, Cold Spring Harbor, New York (1999).

[0028] “Protein,” “polypeptide,” or “peptide” denotes a polymer of at least two amino acids covalently linked by an amide bond, regardless of length or post-translational modification (e.g., glycosylation, phosphorylation, lipidation, myristoylation, ubiquitination, etc.). Included within this definition are D- and L-amino acids, and mixtures of D- and L-amino acids. Unless specified otherwise, the amino acid sequences of a protein, polypeptide, or peptide are displayed herein in the conventional N-terminal to C-terminal orientation.

[0029] “Polynucleotide” and “nucleic acid” are used interchangeably herein and refer to two or more nucleosides that are covalently linked together. The polynucleotide may be wholly comprised of ribonucleosides (i.e., an RNA), wholly comprised of 2′ deoxyribonucleotides (i.e., a DNA) or mixtures of ribo- and 2′ deoxyribonucleosides. The nucleosides will typically be linked together by sugar-phosphate linkages (sugar-phosphate backbone), but the polynucleotides may include one or more non-standard linkages. Non-limiting example of such non-standard linkages include phosphoramidates, phosphorothioates, and amides (see, e.g., Eckstein, F., Oligonucleotides and Analogues: A Practical Approach, Oxford University Press (1992)).

[0030] “Operably linked” or “operably associated” refers to a situation in which two or more polynucleotide sequences are positioned to permit their ordinary functionality. For example, a promoter is operably linked to a coding sequence if it is capable of controlling the expression of the sequence. Other control sequences, such as enhancers, ribosome binding or entry sites, termination signals, polyadenylation sequences, and signal sequences are also operably linked to permit their proper function in transcription or translation.

[0031] “Amino acid position” and “amino acid residue” are used interchangeably to refer to the position of an amino acid in a polypeptide chain. In some embodiments, the amino acid residue can be represented as “XN”, where X represents the amino acid and the N represents its position in the polypeptide chain. Where two or more variations, e.g., polymorphisms, occur at the same amino acid position, the variations can be represented with a “/” separating the variations. A substitution of one amino acid residue with another amino acid residue at a specified residue position can be represented by XNY, where X represents the original amino acid, N represents the position in the polypeptide chain, and Y represents the replacement or substitute amino acid. When the terms are used to describe a polypeptide or peptide portion in reference to a larger polypeptide or protein, the first number referenced describes the position where the polypeptide or peptide begins (i.e., amino end) and the second referenced number describes where the polypeptide or peptide ends (i.e., carboxy end).

[0032] “Polyclonal” antibody refers to a composition of different antibody molecules which is capable of binding to or reacting with several different specific antigenic determinants on the same or on different antigens. A polyclonal antibody can also be considered to be a “cocktail of monoclonal antibodies.” The polyclonal antibodies may be of any origin, e.g., chimeric, humanized, or fully human.

[0033] “Monoclonal antibody” refers to an antibody obtained from a population of substantially homogeneous antibodies, i.e., the individual antibodies comprising the population are identical except for possible naturally occurring mutations that may be present in minor amounts. Each monoclonal antibody is directed against a single determinant on the antigen. In some embodiments, monoclonal antibodies to be used in accordance with the present disclosure can be made by the hybridoma method described by Kohler et al., 1975, Nature 256:495-7, or by recombinant DNA methods. The monoclonal antibodies can also be isolated, e.g., from phage antibody libraries.

[0034] “Chimeric antibody” refers to an antibody made up of components from at least two different sources. A chimeric antibody can comprise a portion of an antibody derived from a first species fused to another molecule, e.g., a portion of an antibody derived from a second species. In some embodiments, a chimeric antibody comprises a portion of an antibody derived from a non-human animal, e.g., mouse or rat, fused to a portion of an antibody derived from a human. In some embodiments, a chimeric antibody comprises all or a portion of a variable region of an antibody derived from a non-human animal fused to a constant region of an antibody derived from a human.

[0035] “Humanized antibody” refers to an antibody that comprises a donor antibody binding specificity, e.g., the CDR regions of a donor antibody, such as a mouse monoclonal antibody, grafted onto human framework sequences. A “humanized antibody” typically binds to the same epitope as the donor antibody.

[0036] “Fully human antibody” or “human antibody” refers to an antibody that comprises human immunoglobulin protein sequences only. A fully human antibody may contain murine carbohydrate chains if produced in a non-human cell, e.g., a mouse, in a mouse cell, or in a hybridoma derived from a mouse cell.

[0037] “Full-length antibody,” “intact antibody” or “whole antibody” are used interchangeably to refer to an antibody, such as an anti-TREM2 antibody of the present disclosure, in its substantially intact form, as opposed to an antibody fragment. Specifically whole antibodies include those with heavy and light chains including an Fc region. The constant domains may be native sequence constant domains {e.g., human native sequence constant domains) or amino acid sequence variants thereof. In some cases, the intact antibody may have one or more effector functions.

[0038] “Antibody fragment” or “antigen-binding moiety” refers to a portion of a full length antibody, generally the antigen binding or variable domain thereof. Examples of antibody fragments include Fab, Fab′, F(ab′)2, and Fv fragments; diabodies; linear antibodies; single-chain antibodies; and multispecific antibodies formed from antibody fragments that bind two or more different antigens. Several examples of antibody fragments containing increased binding stoichiometries or variable valencies (2, 3 or 4) include triabodies, trivalent antibodies and trimerbodies, tetrabodies, tandAbs®, di-diabodies and (sc(Fv)2)₂ molecules, and all can be used as binding agents to bind with high affinity and avidity to soluble antigens (see, e.g., Cuesta et al., 2010, Trends Biotech. 28:355-62).

[0039] “Single-chain Fv” or “sFv” antibody fragment comprises the VH and VL domains of an antibody, where these domains are present in a single polypeptide chain. Generally, the Fv polypeptide further comprises a polypeptide linker between the VH and VL domains which enables the sFv to form the desired structure for antigen binding. For a review of sFv, see Pluckthun in The Pharmacology of Monoclonal Antibodies, Vol. 113, pp. 269-315, Rosenberg and Moore, eds., Springer-Verlag, New York (1994).

[0040] “Diabodies” refers to small antibody fragments with two antigen-binding sites, which comprise a heavy chain variable domain (VH) connected to a light chain variable domain (VL) in the same polypeptide chain (VH-VL). By using a linker that is short to allow pairing between the two domains on the same chain, the domains are forced to pair with the complementary domains of another chain and create two antigen-binding sites.

[0041] “Antigen binding domain” or “antigen binding portion” refers to the region or part of the antigen binding molecule that specifically binds to and complementary to part or all of an antigen. In some embodiments, an antigen binding domain may only bind to a particular part of the antigen (e.g., an epitope), particularly where the antigen is large. An antigen binding domain may comprise one or more antibody variable regions, particularly an antibody light chain variable region (VL) and an antibody heavy chain variable region (VH), and particularly the complementarity determining regions (CDRs) on each of the VH and VL chains.

[0042] “Variable region” and “variable domain” are used interchangeably to refer to the polypeptide region that confers the binding and specificity characteristics of each particular antibody. The variable region in the heavy chain of an antibody is referred to as “VH” while the variable region in the light chain of an antibody is referred to as “VL”. The major variability in sequence is generally localized in three regions of the variable domain, denoted as “hypervariable regions” or “CDRs” in each of the VL region and VH region, and forms the antigen binding site. The more conserved portions of the variable domains are referred to as the framework region FR.

[0043] “Complementarity-determining region” and “CDR” are used interchangeably to refer to non-contiguous antigen binding regions found within the variable region of the heavy and light chain polypeptides of an antibody molecule. In some embodiments, the CDRs are also described as “hypervariable regions” or “HVR”. Generally, naturally occurring antibodies comprise six CDRs, three in the VH (referred to as: CDR H1 or H1; CDR H2 or H2; and CDR H3 or H3) and three in the VL (referred to as: CDR L1 or L1; CDR L2 or L2; and CDR L3 or L3). The CDR domains have been delineated using various approaches, and it is to be understood that CDRs defined by the different approaches are to be encompassed herein. The “Kabat” approach for defining CDRs uses sequence variability and is the most commonly used (Kabat et al., 1991, “Sequences of Proteins of Immunological Interest, 5^{th} Ed.” NIH 1:688-96). “Chothia” uses the location of structural loops (Chothia and Lesk, 1987, J Mol Biol. 196:901-17). CDRs defined by “AbM” are a compromise between the Kabat and Chothia approach, and can be delineated using Oxford Molecular AbM antibody modeling software (see, Martin et al., 1989, Proc. Natl Acad Sci USA. 86:9268; see also, world wide web www.bioinf-org.uk/abs). The “Contact” CDR delineations are based on analysis of known antibody-antigen crystal structures (see, e.g., MacCallum et al., 1996, J. Mol. Biol. 262, 732-45). The CDRs delineated by these methods typically include overlapping or subsets of amino acid residues when compared to each other.

[0044] It is to be understood that the exact residue numbers which encompass a particular CDR will vary depending on the sequence and size of the CDR, and those skilled in the art can routinely determine which residues comprise a particular CDR given the amino acid sequence of the variable region of an antibody.

[0045] Kabat, supra, also defined a numbering system for variable domain sequences that is applicable to any antibody. The Kabat numbering system is generally used when referring to a residue in the variable domain (approximately residues 1-107 of the light chain and residues 1-113 of the heavy chain) (e.g., Kabat et al., Sequences of Immunological Interest. 5th Ed. Public Health Service, National Institutes of Health, Bethesda, Md. (1991)). The “EU or, Kabat numbering system” or “EU index” is generally used when referring to a residue in an immunoglobulin heavy chain constant region (e.g., the EU index reported in Kabat et al., supra). The “EU index as in Kabat” refers to the residue numbering of the human IgG1 EU antibody. References to residue numbers in the variable domain of antibodies means residue numbering by the Kabat numbering system. References to residue numbers in the constant domain of antibodies means residue numbering by the EU or, Kabat numbering system {e.g., see United States Patent Publication No. 2010-280227). One of skill in the art can assign this system of “Kabat numbering” to any variable domain sequence. Accordingly, unless otherwise specified, references to the number of specific amino acid residues in an antibody or antigen binding fragment are according to the Kabat numbering system.

[0046] “Framework region” or “FR region” refers to amino acid residues that are part of the variable region but are not part of the CDRs (e.g., using the Kabat, Chothia or AbM definition). The variable region of an antibody generally contains four FR regions: FR1, FR2, FR3 and FR4. Accordingly, the FR regions in a VL region appear in the following sequence: FR_{L}1-CDR L1-FR_{L}2-CDR L2-FR_{L}3-CDR L3-FR_{L}4, while the FR regions in a VH region appear in the following sequence: FR1_{H}-CDR H1-FR_{H}2-CDR H2-FR_{H}3-CDR H3-FR_{H}4.

[0047] “Constant region” or “constant domain” refers to a region of an immunoglobulin light chain or heavy chain that is distinct from the variable region. The constant domain of the heavy chain generally comprises at least one of: a CH1 domain, a Hinge (e.g., upper, middle, and/or lower hinge region), a CH2 domain, and a CH3 domain. In some embodiments, the antibody can have additional constant domains CH4 and/or CH5. In some embodiments, an antibody described herein comprises a polypeptide containing a CH1 domain; a polypeptide comprising a CH1 domain, at least a portion of a Hinge domain, and a CH2 domain; a polypeptide comprising a CH1 domain and a CH3 domain; a polypeptide comprising a CH1 domain, at least a portion of a Hinge domain, and a CH3 domain, or a polypeptide comprising a CH1 domain, at least a portion of a Hinge domain, a CH2 domain, and a CH3 domain. In some embodiments, the antibody comprises a polypeptide which includes a CH3 domain. The constant domain of a light chain is referred to a CL, and in some embodiments, can be a kappa or lambda constant region. However, it will be understood by one of ordinary skill in the art that these constant domains (e.g., the heavy chain or light chain) may be modified such that they vary in amino acid sequence from the naturally occurring immunoglobulin molecule.

[0048] “Fc region” or “Fc portion” refers to the C terminal region of an immunoglobulin heavy chain. The Fc region can be a native-sequence Fc region or a non-naturally occurring variant Fc region. Generally, the Fc region of an immunoglobulin comprises constant domains CH2 and CH3. Although the boundaries of the Fc region can vary, in some embodiments, the human IgG heavy chain Fc region can be defined to extend from an amino acid residue at position C226 or from P230 to the carboxy terminus thereof. In some embodiments, the “CH2 domain” of a human IgG Fc region, also denoted as “Cγ2”, generally extends from about amino acid residue 231 to about amino acid residue 340. In some embodiments, N-linked carbohydrate chains can be interposed between the two CH2 domains of an intact native IgG molecule. In some embodiments, the CH3 domain” of a human IgG Fc region comprises residues C-terminal to the CH2 domain, e.g., from about amino acid residue 341 to about amino acid residue 447 of the Fc region. A “functional Fc region” possesses an “effector function” of a native sequence Fc region. Exemplary Fc “effector functions” include, among others, C1q binding; complement dependent cytotoxicity (CDC); Fc receptor binding; antibody dependent cell-mediated cytotoxicity (ADCC); phagocytosis; down regulation of cell-surface receptors (e.g., LT receptor); etc. Such effector functions generally require the Fc region to be combined with a binding domain (e.g., an antibody variable domain) and can be assessed using various assays known in the art.

[0049] “Native sequence Fc region” comprises an amino acid sequence identical to the amino acid sequence of an Fc region found in nature. Native sequence human Fc regions include a native sequence human IgG1 Fc region (non-A and A allotypes); native sequence human IgG2 Fc region; native sequence human IgG3 Fc region; and native sequence human IgG4 Fc region as well as naturally occurring variants thereof.

[0050] “Variant Fc region” comprises an amino acid sequence which differs from that of a native sequence Fc region by virtue of at least one amino acid modification, preferably one or more amino acid substitution(s). Preferably, the variant Fc region has at least one amino acid substitution compared to a native sequence Fc region or to the Fc region of a parent polypeptide, e.g. from about one to about ten amino acid substitutions, and preferably from about one to about five amino acid substitutions in a native sequence Fc region or in the Fc region of the parent polypeptide. The variant Fc region herein will preferably possess at least about 80% homology with a native sequence Fc region and/or with an Fc region of a parent polypeptide, and most preferably at least about 90% homology therewith, more preferably at least about 95% homology therewith.

[0051] “Affinity-matured” antibody, such as an affinity matured anti-TREM2 antibody of the present disclosure, is one with one or more alterations in one or more HVRs thereof that result in an improvement in the affinity of the antibody for antigen, compared to a parent antibody that does not possess those alteration(s). In one embodiment, an affinity-matured antibody has nanomolar or even picomolar affinities for the target antigen. Affinity-matured antibodies are produced by procedures known in the art. For example, Marks et al., Bio/Technology, 1992, 10:779-783 describes affinity maturation by VH- and VL-domain shuffling. Random mutagenesis of HVR and/or framework residues is described by, for example: Barbas et al., Proc Nat. Acad. Sci. USA., 1994, 91:3809-3813; Schier et al. Gene, 1995, 169: 147-155; Yelton et al., Immunol., 1995, 155: 1994-2004; Jackson et al., Immunol., 1995, 154(7):3310-9; and Hawkins et al, J. Mol. Biol., 1992, 226:889-896.

[0052] “Binding affinity” refers to strength of the sum total of noncovalent interactions between a ligand and its binding partner. In some embodiments, binding affinity is the intrinsic affinity reflecting a one-to-one interaction between the ligand and binding partner. The affinity is generally expressed in terms of equilibrium association (K_{A}) or dissociation constant (K_{D}), which are in turn reciprocal ratios of dissociation (k_{off}) and association rate constants (kₒₙ).

[0053] “Percent (%) sequence identity” and “percentage sequence homology” are used interchangeably herein to refer to comparisons among polynucleotides or polypeptides, and are determined by comparing two optimally aligned sequences over a comparison window, wherein the portion of the polynucleotide or polypeptide sequence in the comparison window may comprise gaps as compared to the reference sequence for optimal alignment of the two sequences. The percentage may be calculated by determining the number of positions at which the identical nucleic acid base or amino acid residue occurs in both sequences to yield the number of matched positions, dividing the number of matched positions by the total number of positions in the window of comparison and multiplying the result by 100 to yield the percentage of sequence identity. Alternatively, the percentage may be calculated by determining the number of positions at which either the identical nucleic acid base or amino acid residue occurs in both sequences or a nucleic acid base or amino acid residue is aligned with a gap to yield the number of matched positions, dividing the number of matched positions by the total number of positions in the window of comparison and multiplying the result by 100 to yield the percentage of sequence identity. Those of skill in the art appreciate that there are many established algorithms available to align two sequences. Optimal alignment of sequences for comparison can be conducted, e.g., by the local homology algorithm of Smith and Waterman, 1981, Adv Appl Math. 2:482, by the homology alignment algorithm of Needleman and Wunsch, 1970, J Mol Biol. 48:443, by the search for similarity method of Pearson and Lipman, 1988, Proc Natl Acad Sci USA. 85:2444-8, and particularly by computerized implementations of these algorithms (e.g., BLAST, ALIGN, GAP, BESTFIT, FASTA, and TFASTA; see, e.g., Mount, D.W., Bioinformatics: Sequence and Genome Analysis, 2^{nd} Ed., Cold Spring Harbor Laboratory Press, Cold Spring Harbor, New York (2013))

[0054] Examples of algorithms that are suitable for determining percent sequence identity and sequence similarity are the BLAST and BLAST 2.0, FASTDB, or ALIGN algorithms, which are publically available (e.g., NCBI: National Center for Biotechnology Information). Those skilled in the art can determine appropriate parameters for aligning sequences. For example, the BLASTN program (for nucleotide sequences) can use as defaults a wordlength (W) of 11, an expectation (E) of 10, M=5, N=−4, and a comparison of both strands. Comparison of amino acid sequences using BLASTP can use as defaults a wordlength (W) of 3, an expectation (E) of 10, and the BLOSUM62 scoring matrix (see Henikoff and Henikoff, 1989, Proc Natl Acad Sci USA. 89:10915-9).

[0055] “Amino acid substitution” refers to the replacement of one amino acid in a polypeptide with another amino acid. A “conservative amino acid substitution” refers to the interchangeability of residues having similar side chains, and thus typically involves substitution of the amino acid in the polypeptide with amino acids within the same or similar defined class of amino acids. By way of example and not limitation, an amino acid with an aliphatic side chain may be substituted with another aliphatic amino acid, e.g., alanine, valine, leucine, isoleucine, and methionine; an amino acid with hydroxyl side chain is substituted with another amino acid with a hydroxyl side chain, e.g., serine and threonine; an amino acid having aromatic side chains is substituted with another amino acid having an aromatic side chain, e.g., phenylalanine, tyrosine, tryptophan, and histidine; an amino acid with a basic side chain is substituted with another amino acid with a basic side chain, e.g., lysine, arginine, and histidine; an amino acid with an acidic side chain is substituted with another amino acid with an acidic side chain, e.g., aspartic acid or glutamic acid; and a hydrophobic or hydrophilic amino acid is replaced with another hydrophobic or hydrophilic amino acid, respectively.

[0056] “Amino acid insertion” refers to the incorporation of at least one amino acid into a predetermined amino acid sequence. An insertion can be the insertion of one or two amino acid residues; however, larger insertions of about three to about five, or up to about ten or more amino acid residues are contemplated herein.

[0057] “Amino acid deletion” refers to the removal of one or more amino acid residues from a predetermined amino acid sequence. A deletion can be the removal of one or two amino acid residues; however, larger deletions of about three to about five, or up to about ten or more amino acid residues are contemplated herein.

[0058] “Subject” refers to a mammal, including, but not limited to humans, non-human primates, and non-primates, such as goats, horses, and cows. In some embodiments, the terms “subject” and “patient” are used interchangeably herein in reference to a human subject.

[0059] “Therapeutically effective dose” or “therapeutically effective amount” or “effective dose”” refers to that quantity of a compound, including a biologic compound, or pharmaceutical composition that is sufficient to result in a desired activity upon administration to a mammal in need thereof. As used herein, with respect to the pharmaceutical compositions comprising an antibody, the term “therapeutically effective amount/dose” refers to the amount/dose of the antibody or pharmaceutical composition thereof that is sufficient to produce an effective response upon administration to a mammal.

[0060] “Pharmaceutically acceptable” refers to compounds or compositions which are generally safe, non-toxic and neither biologically nor otherwise undesirable, and includes a compound or composition that is acceptable for human pharmaceutical and veterinary use. The compound or composition may be approved or approvable by a regulatory agency or listed in the U.S. Pharmacopeia or other generally recognized pharmacopeia for use in animals, including humans.

[0061] “Pharmaceutically acceptable excipient, carrier or adjuvant” refers to an excipient, carrier or adjuvant that can be administered to a subject, together with at least one therapeutic agent (e.g., an antibody of the present disclosure), and which does not destroy the pharmacological activity thereof and is generally safe, nontoxic and neither biologically nor otherwise undesirable when administered in doses sufficient to deliver a therapeutic amount of the agent.

[0062] The term “treatment” is used interchangeably herein with the term “therapeutic method” and refers to both 1) therapeutic treatments or measures that cure, slow down, lessen symptoms of, and/or halt progression of a diagnosed pathologic conditions, disease or disorder, and 2) and prophylactic/preventative measures. Those in need of treatment may include individuals already having a particular medical disease or disorder as well as those who may ultimately acquire the disorder (i.e., those at risk or needing preventive measures).

[0063] The term “subject” or “patient” as used herein refers to any individual to which the subject methods are performed. Generally, the subject is human, although as will be appreciated by those in the art, the subject may be any animal.

[0064] In some embodiments, compounds of the present invention are able to cross the blood-brain barrier (BBB). The term “blood-brain barrier” or “BBB”, as used herein, refers to the BBB proper as well as to the blood-spinal barrier. The blood-brain barrier, which consists of the endothelium of the brain vessels, the basal membrane and neuroglial cells, acts to limit penetration of substances into the brain. In some embodiments, the brain/plasma ratio of total drug is at least approximately 0.01 after administration (e.g. oral or intravenous administration) to a patient. In some embodiments, the brain/plasma ratio of total drug is at least approximately 0.03. In some embodiments, the brain/plasma ratio of total drug is at least approximately 0.06. In some embodiments, the brain/plasma ratio of total drug is at least approximately 0.1. In some embodiments, the brain/plasma ratio of total drug is at least approximately 0.2.

[0065] The term “homologue,” especially “TREM homologue” as used herein refers to any member of a series of peptides or nucleic acid molecules having a common biological activity, including antigenicity/immunogenicity and inflammation regulatory activity, and/or structural domain and having sufficient amino acid or nucleotide sequence identity as defined herein. TREM homologues can be from either the same or different species of animals.

[0066] The term “variant” as used herein refers either to a naturally occurring allelic variation of a given peptide or a recombinantly prepared variation of a given peptide or protein in which one or more amino acid residues have been modified by amino acid substitution, addition, or deletion.

[0067] The term “derivative” as used herein refers to a variation of given peptide or protein that are otherwise modified, i.e., by covalent attachment of any type of molecule, preferably having bioactivity, to the peptide or protein, including non-naturally occurring amino acids.

### Description of Treatment Methods of the Present Invention

[0068] In one aspect, the present invention provides a method of treating a disease or disorder caused by and/or associated with an ABCD1 dysfunction in a human patient, the method comprising administering to the patient a compound that increases activity of TREM2. In some embodiments, the compound that increases activity of TREM2 is an agonist of TREM2. In some embodiments, the compound that increases activity of TREM2 is a compound that prevents the degradation of TREM2.

[0069] In one aspect, the present invention provides a method of treating a disease or disorder caused by and/or associated with an ABCD1 dysfunction in a human patient, the method comprising administering to the patient an effective amount of an agonist of TREM2. In some embodiments, administration of the agonist of TREM2 activates DAP12 signaling pathways in the patient, resulting in an increase in microglia proliferation, microglia survival and microglia phagocytosis, which in turn results in a slowing of disease progression. In some embodiments, the agonist of TREM2 is an antibody or a small molecule.

[0070] In some embodiments, the agonist of TREM2 activates TREM2/DAP12 signaling in myeloid cells, including monocytes, dendritic cells, microglial cells and macrophages. In some embodiments, an agonist of TREM2 activates, induces, promotes, stimulates, or otherwise increases one or more TREM2 activities. TREM2 activities that are activated or increased by the agonist, include but are not limited to: TREM2 binding to DAP12; DAP12 binding to TREM2; TREM2 phosphorylation, DAP12 phosphorylation; PI3K activation; increased levels of soluble TREM2 (sTREM2); increased levels of soluble CSF1R (sCSF1R); increased expression of one or more anti-inflammatory mediators (e.g., cytokines) selected from the group consisting of IL-12p70, IL-4, IL-6, and IL-1β; reduced expression of one or more pro-inflammatory mediators selected from the group consisting of IFN-α4, IFN-b, IL-6, IL-12 p70, IL-12 p40, IL-1β, TNF, TNF-α, IL-1β, IL-8, CRP, TGF-beta members of the chemokine protein families, IL-20 family members, IL-33, LIF, IFN-gamma, OSM, CNTF, TGF-beta, GM-CSF, IL-11, IL-12, IL-17, IL-18, and CRP; increased expression of one or more chemokines selected from the group consisting of CCL2, CCL4, CXCL10, CCL3 and CST7; reduced expression of TNF-α, IL-6, or both; extracellular signal-regulated kinase (ERK) phosphorylation; increased expression of C-C chemokine receptor 7 (CCR7); induction of microglial cell chemotaxis toward CCL19 and CCL21 expressing cells; an increase, normalization, or both of the ability of bone marrow-derived dendritic cells to induce antigen-specific T-cell proliferation; induction of osteoclast production, increased rate of osteoclastogenesis, or both; increasing the survival and/or function of one or more of dendritic cells, macrophages, microglial cells, M1 macrophages and/or microglial cells, activated M1 macrophages and/or microglial cells, M2 macrophages and/or microglial cells, monocytes, osteoclasts, Langerhans cells of skin, and Kupffer cells; induction of one or more types of clearance selected from the group consisting of apoptotic neuron clearance, nerve tissue debris clearance, non-nerve tissue debris clearance, bacteria or other foreign body clearance, disease-causing protein clearance, disease-causing peptide clearance, and disease-causing nucleic acid clearance; induction of phagocytosis of one or more of apoptotic neurons, nerve tissue debris, non-nerve tissue debris, bacteria, other foreign bodies, disease-causing proteins, disease-causing peptides, or disease-causing nucleic acids; normalization of disrupted TREM2/DAP12-dependent gene expression; recruitment of Syk, ZAP70, or both to the TREM2/DAP12 complex; Syk phosphorylation; increased expression of CD83 and/or CD86 on dendritic cells, macrophages, monocytes, and/or microglia; reduced secretion of one or more inflammatory cytokines selected from the group consisting of TNF-α, IL-1β, IL-6, MCP-1, IFN-α4, IFN-b, IL-1β, IL-8, CRP, TGF-beta members of the chemokine protein families, IL-20 family members, IL-33, LIF, IFN-gamma, OSM, CNTF, TGF-beta, GM-CSF, IL-11, IL-12, IL-17, IL-18, and CRP; reduced expression of one or more inflammatory receptors; increasing phagocytosis by macrophages, dendritic cells, monocytes, and/or microglia under conditions of reduced levels of MCSF; decreasing phagocytosis by macrophages, dendritic cells, monocytes, and/or microglia in the presence of normal levels of MCSF; increasing activity of one or more TREM2-dependent genes; increased levels of one or more of CSF1, CSF2 and IL-34; or any combination thereof. In another aspect, the invention provides a TREM2 agonist for the manufacture of a medicament for the treatment of a disease or disorder caused by and/or associated with an ABCD1 dysfunction.

[0071] In another aspect, the invention provides a TREM2 agonist for use in treating a disease or disorder caused by and/or associated with an ABCD1 dysfunction in a human patient.

### I. Diseases and Disorders

[0072] The methods of the present invention can be used to treat any disease or disorder related to a dysfunction in ABCD1. In some embodiments, the patient is selected for treatment based on a diagnosis that includes the presence of a mutation in an ABCD1 gene affecting the function of ABCD1. In some embodiments, the mutation in the ABCD1 gene is a mutation that causes a decrease in ABCD1 activity or a cessation of ABCD1 activity. In some embodiments, the disease or disorder is caused by a heterozygous ABCD1 mutation. In some embodiments, the disease or disorder is caused by a homozygous ABCD1 mutation. In some embodiments,
[0073] the disease or disorder is caused by a splice mutation in the ABCD1 gene. In some embodiments, the disease or disorder is caused by a missense mutation in the ABCD1 gene.

[0074] In some embodiments, the disease or disorder is a disease or disorder resulting from a change (e.g. increase, decrease or cessation) in the activity of ABCD1. In some embodiments, the disease or disorder is a disease or disorder resulting from a decrease or cessation in the activity of ABCD1. ABCD1 related activities that are changed in the disease or disorder include, but are not limited to peroxisomal import of fatty acids and/or fatty acyl-CoAs and production of adrenoleukodystrophy protein (ALDP).

[0075] In some embodiments, the disease or disorder is caused by a loss-of-function mutation in ABCD1. In some embodiments, the loss-of-function mutation results in a complete cessation of ABCD1 function. In some embodiments, the loss-of-function mutation results in a partial loss of ABCD1 function, or a decrease in ABCD1 activity. In some embodiments, the disease or disorder is caused by a homozygous mutation in ABCD1.

[0076] In some embodiments, the disease or disorder is a neurodegenerative disorder. In some embodiments, the disease or disorder is a neurodegenerative disorder caused by and/or associated with an ABCD1 dysfunction.

[0077] In some embodiments, the disease or disorder is an immunological disorder. In some embodiments, the disease or disorder is an immunological disorder caused by and/or associated with an ABCD1 dysfunction.

[0078] In some embodiments, the disease or disorder is selected from X-linked adrenoleukodystrophy (x-ALD), Globoid cell leukodystrophy (also known as Krabbe disease), Metachromatic leukodystrophy (MLD), Cerebral autosomal dominant arteriopathy with subcortical infarcts and leukoencephalopathy (CADASIL), Alexander disease, fragile X-associated tremor ataxia syndrome (FXTAS), adult-onset autosomal dominant leukodystrophy (ADLD), and X-linked Charcot-Marie-Tooth disease (CMTX).

[0079] In some embodiments, the disease or disorder is selected from X-linked adrenoleukodystrophy (x-ALD), Globoid cell leukodystrophy (also known as Krabbe disease), Metachromatic leukodystrophy (MLD), Cerebral autosomal dominant arteriopathy with subcortical infarcts and leukoencephalopathy (CADASIL), Vanishing white matter disease (VWM), Alexander disease, fragile X-associated tremor ataxia syndrome (FXTAS), adult-onset autosomal dominant leukodystrophy (ADLD), and X-linked Charcot-Marie-Tooth disease (CMTX), wherein any of the aforementioned diseases or disorders are present in a patient exhibiting ABCD1 dysfunction, or having a mutation in a gene affecting the function of ABCD1.

[0080] In some embodiments, the disease or disorder is X-linked adrenoleukodystrophy (x-ALD). In some embodiments, the x-ALD is a cerebral form of X-linked ALD (cALD).

[0081] In some embodiments, the disease or disorder is Addison disease wherein the patient has been found to have a mutation in one or more ABCD1 genes affecting ABCD1 function. In some embodiments, the disease or disorder is Addison disease, wherein the patient has a loss-of-function mutation in ABCD1.

[0082] In some embodiments, the disease or disorder is a white matter disease wherein the patient has been found to have a mutation in one or more ABCD1 genes affecting ABCD1 function. In some embodiments, the disease or disorder is a white matter disease, wherein the patient has a loss-of-function mutation in ABCD1.

[0083] In some embodiments, the disease or disorder is vanishing white matter disease wherein the patient has been found to have a mutation in one or more ABCD1 genes affecting ABCD1 function. In some embodiments, the disease or disorder is vanishing white matter disease, wherein the patient has a loss-of-function mutation in ABCD1.

[0084] In some embodiments, the disease or disorder is selected from Nasu-Hakola disease, Alzheimer's disease, frontotemporal dementia, multiple sclerosis, Guillain-Barre syndrome, amyotrophic lateral sclerosis (ALS), or Parkinson's disease, wherein any of the aforementioned diseases or disorders are present in a patient exhibiting ABCD1 dysfunction, or having a mutation in a gene affecting the function of ABCD1.

[0085] In some embodiments, the disease or disorder is Alzheimer's disease wherein the patient has been found to have a mutation in one or more ABCD1 genes affecting ABCD1 function. In some embodiments, the patient has been diagnosed with Alzheimer's disease based on neuropathology, and also has been found to have a mutation in one or more ABCD1 genes affecting ABCD1 function. In some embodiments, the disease or disorder is Alzheimer's disease, wherein the patient has a loss-of-function mutation in ABCD1.

[0086] In some embodiments, the disease or disorder is Nasu-Hakola disease wherein the patient has been found to have a mutation in one or more ABCD1 genes affecting ABCD1 function. In some embodiments, the patient has been diagnosed with Nasu-Hakola disease based on neuropathology, and also has been found to have a mutation in one or more ABCD1 genes affecting ABCD1 function. In some embodiments, the disease or disorder is Nasu-Hakola disease, wherein the patient has a loss-of-function mutation in ABCD1.

[0087] In some embodiments, the disease or disorder is Parkinson's disease wherein the patient has been found to have a mutation in one or more ABCD1 genes affecting ABCD1 function. In some embodiments, the patient has been diagnosed with Parkinson's disease based on neuropathology, and also has been found to have a mutation in one or more ABCD1 genes affecting ABCD1 function. In some embodiments, the disease or disorder is Parkinson's disease, wherein the patient has a loss-of-function mutation in ABCD1.

[0088] In some embodiments, the disease or disorder is multiple sclerosis wherein the patient has been found to have a mutation in one or more ABCD1 genes affecting ABCD1 function. In some embodiments, the patient has been diagnosed with multiple sclerosis based on neuropathology, and also has been found to have a mutation in one or more ABCD1 genes affecting ABCD1 function. In some embodiments, the disease or disorder is multiple sclerosis, wherein the patient has a loss-of-function mutation in ABCD1.

[0089] In some embodiments, the disease or disorder is ALS wherein the patient has been found to have a mutation in one or more ABCD1 genes affecting ABCD1 function. In some embodiments, the patient has been diagnosed with ALS based on neuropathology, and also has been found to have a mutation in one or more ABCD1 genes affecting ABCD1 function. In some embodiments, the disease or disorder is ALS, wherein the patient has a loss-of-function mutation in ABCD1.

[0090] In some embodiments, the disease or disorder is Guillain-Barre syndrome wherein the patient has been found to have a mutation in one or more ABCD1 genes affecting ABCD1 function. In some embodiments, the patient has been diagnosed with Guillain-Barre syndrome based on neuropathology, and also has been found to have a mutation in one or more ABCD1 genes affecting ABCD1 function. In some embodiments, the disease or disorder is Guillain-Barre syndrome, wherein the patient has a loss-of-function mutation in ABCD1.

[0091] In some embodiments, the patient also possesses a mutation in one or more of NOTCH3, HTRA1, TREX1, ARSA, EIF2B1, EIF2B2, EIF2B3, EIF2B4, and EIF2B5.

[0092] In some embodiments, the disease or disorder presents one or more symptoms selected from abnormal motor control, parkinsonism, slow movement (bradykinesia), involuntary trembling (tremor), muscle stiffness (rigidity), cognitive decline, dementia, inability to speak, inability to walk, memory loss, personality changes, seizures, depression, loss of executive function, loss of impulse control, loss of attention span, adrenal insufficiency, vision impairment, hearing impairment, sexual dysfunction, impaired adrenocortical function, attention-deficit, hyperactivity, and incontinence.

[0093] In one aspect, the present invention provides a method of treating x-ALD in a human patient, the method comprising administering to the patient a compound that increases activity of TREM2. In some embodiments, the compound that increases activity of TREM2 is an agonist of TREM2. In some embodiments, the compound that increases activity of TREM2 is a compound that prevents the degradation of TREM2.

[0094] In one aspect, the present invention provides a method of treating x-ALD in a human patient, the method comprising administering to the patient an effective amount of an agonist of TREM2. In some embodiments, administration of the agonist of TREM2 activates DAP12 signaling pathways in the patient, resulting in an increase in microglia proliferation, microglia survival and microglia phagocytosis, which in turn results in a slowing of disease progression in x-ALD. In some embodiments, the agonist of TREM2 is an antibody or a small molecule.

[0095] In another aspect, the invention provides a TREM2 agonist for the manufacture of a medicament for the treatment of a disease or disorder related to an ABCD1 dysfunction. In another aspect, the invention provides a TREM2 agonist for the manufacture of a medicament for the treatment of x-ALD.

[0096] In another aspect, the invention provides a TREM2 agonist for use in treating a disease or disorder related to an ABCD1 dysfunction in a human patient. In another aspect, the invention provides a TREM2 agonist for use in treating x-ALD in a human patient.

### Huntington's Disease

[0097] In one aspect, the present invention provides a method of treating Huntington's disease in a human patient, the method comprising administering to the patient an effective amount of an agonist of TREM2. In some embodiments, administration of the agonist of TREM2 activates DAP12 signaling pathways in the patient, resulting in an increase in microglia proliferation, microglia survival and microglia phagocytosis, which in turn results in a slowing of disease progression in Huntington's disease. In some embodiments, the agonist of TREM2 is an antibody or a small molecule. In some embodiments, the agonist of TREM2 is an antibody or a small molecule disclosed elsewhere herein. In some embodiments, the agonist of TREM2 is an antibody disclosed elsewhere herein. In some embodiments, the agonist of TREM2 is a small molecule disclosed elsewhere herein. In another aspect, the invention provides a TREM2 agonist for the manufacture of a medicament for the treatment of Huntington's disease. In another aspect, the invention provides a TREM2 agonist for use in treating Huntington's disease in a human patient.

### II. Antibodies

[0098] In one aspect, the present invention provides a method of treating ALSP in a human patient, the method comprising administering to the patient an effective amount of an antigen binding protein or an antibody, or an antigen-binding fragment thereof, which increases the activity of TREM2. In some embodiments, the antibody is an agonist of TREM2. In some embodiments, the antibody is an agonist of TREM2 that specifically binds to and activates human TREM2.

[0099] The TREM2 agonist antibodies specifically bind to human TREM2 (SEQ ID NO: 1) or an extra cellular domain (ECD) of human TREM2 (e.g. ECD set forth in SEQ ID NO: 2), for example with an equilibrium dissociation constant (K_{D}) less than 50 nM, less than 25 nM, less than 10 nM, or less than 5 nM. In some embodiments, the TREM2 agonist antibodies do not cross-react with other TREM proteins, such as human TREM1. In some embodiments, the TREM2 agonist antibodies do not bind to human TREM1 (SEQ ID NO: 4).

[0100] In some embodiments, the TREM2 antibody specifically bind to human TREM2 human TREM2 residues 19-174. In some embodiments, the TREM2 antibody specifically bind to IgV region of human TREM2, for example human TREM2 residues 19-140.

[0101] In certain embodiments, anti-TREM2 antibodies of the present disclosure bind to one or more amino acids within amino acid residues 29-112 of human TREM 2 (SEQ ID NO: 1), or within amino acid residues on a TREM2 protein corresponding to amino acid residues 29-112 of SEQ ID NO: 1. In some embodiments, anti-TREM2 antibodies of the present disclosure bind to one or more amino acids within amino acid residues 29-41 of human TREM 2 (SEQ ID NO: 1), or within amino acid residues on a TREM2 protein corresponding to amino acid residues 29-41 of SEQ ID NO: 1. In some embodiments, anti-TREM2 antibodies of the present disclosure bind to one or more amino acids within amino acid residues 47-69 of human TREM 2 (SEQ ID NO: 1), or within amino acid residues on a TREM2 protein corresponding to amino acid residues 47-69 of SEQ ID NO: 1. In some embodiments, anti-TREM2 antibodies of the present disclosure bind to one or more amino acids within amino acid residues 76-86 of human TREM 2 (SEQ ID NO: 1), or within amino acid residues on a TREM2 protein corresponding to amino acid residues 76-86 of SEQ ID NO: 1. In some embodiments, anti-TREM2 antibodies of the present disclosure bind to one or more amino acids within amino acid residues 91-100 of human TREM2 (SEQ ID NO: 1), or within amino acid residues on a TREM2 protein corresponding to amino acid residues 91-100 of SEQ ID NO: 1. In some embodiments, anti-TREM2 antibodies of the present disclosure bind to one or more amino acids within amino acid residues 99-115 of human TREM 2 (SEQ ID NO: 1), or within amino acid residues on a TREM2 protein corresponding to amino acid residues 99-115 of SEQ ID NO: 1. In some embodiments, anti-TREM2 antibodies of the present disclosure bind to one or more amino acids within amino acid residues 104-112 of human TREM 2 (SEQ ID NO: 1), or within amino acid residues on a TREM2 protein corresponding to amino acid residues 104-112 of SEQ ID NO: 1. In some embodiments, anti-TREM2 antibodies of the present disclosure bind to one or more amino acids within amino acid residues 114-118 of human TREM 2 (SEQ ID NO: 1), or within amino acid residues on a TREM2 protein corresponding to amino acid residues 114-118 of SEQ ID NO: 1. In some embodiments, anti-TREM2 antibodies of the present disclosure bind to one or more amino acids within amino acid residues 130-171 of human TREM 2 (SEQ ID NO: 1), or within amino acid residues on a TREM2 protein corresponding to amino acid residues 130-171 of SEQ ID NO: 1. In some embodiments, anti-TREM2 antibodies of the present disclosure bind to one or more amino acids within amino acid residues 139-153 of human TREM 2 (SEQ ID NO: 1), or within amino acid residues on a TREM2 protein corresponding to amino acid residues 139-153 of SEQ ID NO: 1. In some embodiments, anti-TREM2 antibodies of the present disclosure bind to one or more amino acids within amino acid residues 139-146 of human TREM 2 (SEQ ID NO: 1), or within amino acid residues on a TREM2 protein corresponding to amino acid residues 139-146 of SEQ ID NO: 1. In some embodiments, anti-TREM2 antibodies of the present disclosure bind to one or more amino acids within amino acid residues 130-144 of human TREM 2 (SEQ ID NO: 1), or within amino acid residues on a TREM2 protein corresponding to amino acid residues 130-144 of SEQ ID NO: 1. In some embodiments, anti-TREM2 antibodies of the present disclosure bind to one or more amino acids within amino acid residues 158-171 of human TREM 2 (SEQ ID NO: 1), or within amino acid residues on a TREM2 protein corresponding to amino acid residues 158-171 of SEQ ID NO: 1.

[0102] In some embodiments, anti-TREM2 antibodies of the present disclosure bind to one or more amino acids within amino acid residues 43-50 of human TREM 2 (SEQ ID NO: 1), or within amino acid residues on a TREM2 protein corresponding to amino acid residues 43-50 of SEQ ID NO: 1. In some embodiments, anti-TREM2 antibodies of the present disclosure bind to one or more amino acids within amino acid residues 49-57 of human TREM 2 (SEQ ID NO: 1), or within amino acid residues on a TREM2 protein corresponding to amino acid residues 49-57 of SEQ ID NO: 1. In some embodiments, anti-TREM2 antibodies of the present disclosure bind to one or more amino acids within amino acid residues 139-146 of human TREM 2 (SEQ ID NO: 1), or within amino acid residues on a TREM2 protein corresponding to amino acid residues 139-146 of SEQ ID NO: 1. In some embodiments, anti-TREM2 antibodies of the present disclosure bind to one or more amino acids within amino acid residues 140-153 of human TREM 2 (SEQ ID NO: 1), or within amino acid residues on a TREM2 protein corresponding to amino acid residues 140-153 of SEQ ID NO: 1. In some embodiments, the TREM2 antibody specifically binds to the stalk region of human TREM2, for example amino acid residues 145-174 of human TREM2.

[0103] In some embodiments, the antibody, or an antigen-binding fragment thereof, specifically binds TREM2 and prevents the degradation or cleavage of TREM2.

[0104] In some embodiments, the antibody is a polyclonal antibody. In some embodiments, the antibody is a monoclonal antibody. In some embodiments, the antibody is a chimeric antibody. In some embodiments, the antibody is a humanized antibody. In some embodiments, the antibody is a human antibody, particularly a fully human antibody. In some embodiments, the antibody is a bispecific or other multivalent antibody. In some embodiments, the antibody is a single chain antibody.

[0105] In some embodiments, a TREM2 activating antibody comprise a light chain variable region comprising complementarity determining regions CDRL1, CDRL2, and CDRL3 and a heavy chain variable region comprising complementarity determining regions CDRH1, CDRH2, and CDRH3 described herein.

[0106] In certain embodiments, the TREM2 agonist antigen binding proteins of the invention comprise at least one light chain variable region comprising a CDRL1, CDRL2, and CDRL3, and at least one heavy chain variable region comprising a CDRH1, CDRH2, and CDRH3 from an anti-TREM2 agonist antibody described herein.

[0107] In some embodiments, a TREM2 activating antibody comprise a light chain variable region and a heavy chain variable region described herein. The light chain and heavy chain variable regions or CDRs may be from any of the anti-TREM2 antibodies or a variant thereof described herein.

### Sequence Information

A. PCT Patent Application Publication No. WO2018/195506A1

[0108] In some embodiments, the TREM2 agonist is an antigen binding protein or an antibody, or an antigen-binding fragment thereof, as described in PCT Patent Application Publication No. WO2018/195506A1, which is incorporated by reference herein, in its entirety.

[0109] In some embodiments, the TREM2 agonist antigen binding protein comprises a CDRL1 or a variant thereof having one, two, three or four amino acid substitutions; a CDRL2, or a variant thereof having one, two, three or four amino acid substitutions; a CDRL3, or a variant thereof having one, two, three or four amino acid substitutions; a CDRH1, or a variant thereof having one, two, three or four amino acid substitutions; a CDRH2, or a variant thereof having one, two, three or four amino acid substitutions; and a CDRH3, or a variant thereof having one, two, three or four amino acid substitutions, where the amino acid sequences of the CDRL1, CDRL2, CDRL3, CDRH1, CDRH2, and CDRH3 are provided in TABLES A1 and A2 below, along with exemplary light chain and variable regions.

TABLE A1
Exemplary Anti-Human TREM2 Antibody Light Chain Variable Region Amino Acid Sequences

| Ab ID. | VL Group | VL Amino Acid Sequence | CDRL1 | CDRL2 | CDRL3 |
|---|---|---|---|---|---|
| 12G10 | LV-01 | QAVPTQPSSLSASPGVLASLTCTLRSGINVG | TLRSGI | YKSDSD | MIWYSS |
| | | TYRIYWYQQKPGSPPQYLLRYKSDSDKQQ | NVGTY | KQQGS | AVV |
| | | GSGVPSRFSGSKDASANAGILLISGLQSEDE | RIY | (SEQ ID | (SEQ ID |
| | | ADYYCMIWYSSAVVFGGGTKLTVL | (SEQ ID | NO: 19) | NO: 31) |
| | | (SEQ ID NO: 46) | NO: 5) | | |
| 26A10 | LV-02 | SYELTQPPSVSVSPGQTASITCSGDKLGDKY | SGDKL | QDSKRP | QAWDS |
| | | VCWYQQKPGQSPVLVIYQDSKRPSGIPERF | GDKYVC | S | NTVV |
| | | SGSNSGNTATLTISGTQAMDEADYYCQAW | (SEQ ID | (SEQ ID | (SEQ ID |
| | | DSNTVVFGGGTKLTVL (SEQ ID NO: 47) | NO: 6) | NO: 20) | NO: 32) |
| 26C10 | LV-03 | SFELTQPPSVSVSPGQTASITCSGDKLGDKY | SGDKL | QDTKRP | QAWDSS |
| | | VCWYQQKPGQSPMLVIYQDTKRPSGIPERF | GDKYVC | S | TVV |
| | | SGSNSGNTATLTISGTQAMDEADYYCQAW | (SEQ ID | (SEQ ID | (SEQ ID |
| | | DSSTVVFGGGTKLTVL (SEQ ID NO: 48) | NO: 6) | NO: 21) | NO: 33) |
| 26F2 | LV-04 | SYELTQPPSVSVSPGQTASITCSGDKLGDKY | SGDKL | QDSKRP | QAWDSS |
| | | VCWYQQKPGQSPVLVIFQDSKRPSGIPERFS | GDKYVC | S | TVV |
| | | GSNSGNTATLTISGTQAMDEADYYCQAWD | (SEQ ID | (SEQ ID | (SEQ ID |
| | | SSTVVFGGGTKLTVL (SEQ ID NO: 49) | NO: 6) | NO: 20) | NO: 33) |
| 33B12 | LV-05 | SYELTQPPSVSVSPGQTASITCSGDKLGDKY | SGDKL | QDSKRP | QAWDSS |
| | | VCWYQQKPGQSPVLVIYQDSKRPSGIPERF | GDKYVC | S | TVV |
| | | SGSNSGNTATLTISGTQAMDEADYYCQAW | (SEQ ID | (SEQ ID | (SEQ ID |
| | | DSSTVVFGGGTKLTVL (SEQ ID NO: 50) | NO: 6) | NO: 20) | NO: 33) |
| 24C12 | LV-06 | GIVMTQSPDSLAVSLGERATINCKSSRSVLY | KSSRSV | WASTRE | QQYYIT |
| | | SSNNKNYLAWYQQKPGQPPKVLIYWASTR | LYSSN | S | PIT |
| | | ESGVPDRFSGSGSGTDFTLTISSLQAEDVAV | KNYLA | (SEQ ID | (SEQ ID |
| | | YNCQQYYITPITFGQGTRLEIK | (SEQ ID | NO: 22) | NO: 34) |
| | | (SEQ ID NO: 51) | NO: 7) | | |
| 24G6 | LV-07 | DIVMTQSPDSLAVSLGERATINCKSSQSVLY | KSSQSV | WASTRE | QQYYST |
| | | SSNNKHFLAWYQQKPGQPPKLLIYWASTR | LYSSN | S | PLT |
| | | ESGVPDRFSGSGSGTDFTLTISSLQAEDVAF | KFIFLA | (SEQ ID | (SEQ ID |
| | | YYCQQYYSTPLTFGGGTKVEIK | (SEQ ID | NO: 22) | NO: 35) |
| | | (SEQ ID NO: 52) | NO: 8) | | |
| 24A10 | LV-08 | DIVMTQSPDSLAVSLGERATITCKSSHNVL | KSSHN | WASTRE | HQYYST |
| | | YSSNNKNYLAWYQQKPGQPPKLLIYWAST | VLYSSN | S | PCS |
| | | RESGVPDRFSGSGSGTDFTLTISSLQAEDVA | NKNYLA | (SEQ ID | (SEQ ID |
| | | VYYCHQYYSTPCSFGQGTKLEIK | (SEQ ID | NO: 22) | NO: 36) |
| | | (SEQ ID NO: 53) | NO: 9) | | |
| 10E3 | LV-09 | EIVMTQSPATLSVSPGERATLSCRASQSVSS | RASQS | GASTRA | LQDNN |
| | | NLAWFQQKPGQAPRLLIYGASTRATGIPAR | VSSNLA | T | WPPT |
| | | FSVSGSGTEFTLTISSLQSEDFAFYYCLQDN | (SEQ ID | (SEQ ID | (SEQ ID |
| | | NWPPTFGPGTKVDIK (SEQ ID NO: 54) | NO: 10) | NO: 23) | NO: 37) |
| 13E7 | LV-10 | EIVMTQSPATLSVSPGERATLSCRASQSVSS | RASQS | GASTRA | LQDNN |
| 14C12 | | NLAWFQQKPGQAPRLLIYGASTRATGIPAR | VSSNLA | T | WPPT |
| | | FSVSGSGTEFTLTISSLQSEDFAVYYCLQDN | (SEQ ID | (SEQ ID | (SEQ ID |
| | | NWPPTFGPGTKVDIK (SEQ ID NO: 55) | NO: 10) | NO: 23) | NO: 37) |
| 25F12 | LV-11 | EKVMTQSPATLSVSPGERATLSCRASQSVN | RASQS | GASTRA | QQYNN |
| | | NNLAWYQQKPGQAPRLLIYGASTRATGIPA | VNNNL | T | WPRT |
| | | RFSGSGSGTEFTLTISSLQSEDFAVYYCQQY | A | (SEQ ID | (SEQ ID |
| | | NNWPRTFGQGTKVEIK (SEQ ID NO: 56) | (SEQ ID | NO: 23) | NO: 38) |
| | | | NO: 11) | | |
| 32E3 | LV-12 | EFVLTQSPGTLSLSPGERATLSCRASQIISSN | RASQIIS | SASSRA | QQFDSS |
| | | YLAWYQQKPGQAPRLLIYSASSRATGIPDR | SNYLA | T | PIT |
| | | FSGSGSGTDFTLTISRLEPEDFAVYYCQQFD | (SEQ ID | (SEQ ID | (SEQ ID |
| | | SSPITFGRGTRLDIK (SEQ ID NO: 57) | NO: 12) | NO: 24) | NO: 39) |
| 24F4 | LV-13 | EIVLTQSPGTLSLSPGERATLSCRASQSVSSS | RASQS | GASSRA | QQYDTS |
| | | YLAWYQQKPGQAPRLLIYGASSRATGIPDR | VSSSYLA | T | PFT |
| | | FSGSGSGTDFTLTISRLEPEDFALYYCQQYD | (SEQ ID | (SEQ ID | (SEQ ID |
| | | TSPFTFGPGTKVDIK (SEQ ID NO: 58) | NO: 13) | NO: 25) | NO: 40) |
| 16B8 | LV 14 | DIQMTQSPSSVSASVGDRVTVTCRASQDIN | RASQDI | AASSLQ | QQSNSF |
| | | SWLAWYQQKPGKAPKLLIYAASSLQTGVP | NSWLA | T | PIT |
| | | SRFSGSGSGTDFTLTISSLQPEDFATYSCQQS | (SEQ ID | (SEQ ID | (SEQ ID |
| | | NSFPITFGQGTRLEIK (SEQ ID NO: 59) | NO: 14) | NO: 26) | NO: 41) |
| 4C5 | LV-15 | DIQMTQSPSSVSASVGDRVTITCRASQGISN | RASQGI | AASSLQ | QQADSF |
| | | WLAWYQQKPGKAPKLLIYAASSLQVGVPL | SNWLA | V | PRN |
| | | RFSGSGSGTDFTLTISSLQPEDFATYYCQQA | (SEQ ID | (SEQ ID | (SEQ ID |
| | | DSFPRNFGQGTKLEIK (SEQ ID NO: 60) | NO: 15) | NO: 27) | NO: 42) |
| 6E7 | LV-16 | DIQMTQSPSSVSASVGDRVTITCRASQGISS | RASQGI | AASSLQ | QQADSF |
| | | WLAWYQQKPGKAPKLLIYAASSLQNGVPS | SSWLA | N | PRT |
| | | RFSGSGSGTDFTLTISSLQPEDFATYFCQQA | (SEQ ID | (SEQ ID | (SEQ ID |
| | | DSFPRTFGQGTKLEIK (SEQ ID NO: 61) | NO: 16) | NO: 28) | NO: 43) |
| 5E3 | LV-17 | DIQMTQSPSSLSASVGDRVTITCRASQGISN | RASQGI | AASSLQ | QQYSTY |
| | | YLAWFQQKPGKAPKSLIYAASSLQSGVPSK | SNYLA | S | PFT |
| | | FSGSGSGTDFTLTISSLQPEDFATYYCQQYS | (SEQ ID | (SEQ ID | (SEQ ID |
| | | TYPFTFGPGTKVDIK (SEQ ID NO: 62) | NO: 17) | NO: 29) | NO: 44) |
| 4G10 | LV-18 | DIQMTQSPSSLSASVGDRVTITCRASQGIRN | RASQGI | AASSLPS | LQHNSY |
| | | DLGWYQQKPGNAPKRLIYAASSLPSGVPSR | RNDLG | (SEQ ID | PWT |
| | | FSGSGSGPEFTLTISSLQPEDFATYYCLQHN | (SEQ ID | NO: 30) | (SEQ ID |
| | | SYPWTFGQGTKVEIT (SEQ ID NO: 63) | NO: 18) | | NO: 45) |

TABLE A2
Exemplary Anti-Human TREM2 Antibody Heavy Chain Variable Region Amino Acid Sequences

| Ab ID. | VH Group | VH Amino Acid Sequence | CDRH1 | CDRH2 | CDRH3 |
|---|---|---|---|---|---|
| 12G10 | HV-01 | EVQLLESGGGLVQPGGSLRLSCAASGFTFS | SYAMS | AIGGGG | FYIAVA |
| 24C12 | | SYAMSWVRQAPGKGLEWVSAIGGGGVST | (SEQ ID | VSTYCA | GSHFDY |
| | | YCADSVKGRFTISRDNSKNTLYLQMNSLRA | NO: 77) | DSVKG | (SEQ ID |
| | | EDTAVYYCAKFYIAVAGSHFDYWGQGTLV | | (SEQ ID | NO: 95) |
| | | TVSS (SEQ ID NO: 110) | | NO: 87) | |
| 26A10 | HV-02 | EVQLVESGGALVQRGGSLRLSCAASRFTFS | SFGMS | YISSSSF | EGGLTM |
| | | SFGMSWVRQAPGKGLEWVSYISSSSFTIYY | (SEQ ID | TIYYAD | VRGVSS |
| | | ADSVKGRFTISRDNAKNSFYLQMNSLRDED | NO: 78) | SVKG | YGLDV |
| | | TAVYYCAREGGLTMVRGVSSYGLDVWGQ | | (SEQ ID | (SEQ ID |
| | | GTTVTVSS (SEQ ID NO: 111) | | NO: 88) | NO: 96) |
| 26C10 | HV-03 | EVQLVESGGALVQPGGSLRLSCAASGFTFS | SFGMS | YISSSSF | EGGITM |
| | | SFGMSWVRQAPGKGLEWVSYISSSSFTIYY | (SEQ ID | TIYYAD | VRGVSS |
| | | ADSVKGRFTISRDNAKNSFYLQMNSLRDED | NO: 78) | SVKG | YGMDV |
| | | TAVYFCVREGGITMVRGVSSYGMDVWGQ | | (SEQ ID | (SEQ ID |
| | | GTTVTVSS (SEQ ID NO: 112) | | NO: 88) | NO: 97) |
| 26F2 | HV-04 | EVQLVESGGALVQPGGSLRLSCAASGFTFS | SFGMS | YISSSSF | EGGITM |
| | | SFGMSWVRQAPGKGLEWISYISSSSFTIYYA | (SEQ ID | TIYYAD | VRGVSS |
| | | DSVKGRFTISRDNAKNSFYLQMNSLRDEDT | NO: 78) | SVKG | YGMDV |
| | | AVYFCAREGGITMVRGVSSYGMDVWGQG | | (SEQ ID | (SEQ ID |
| | | TTVTVSS (SEQ ID NO: 113) | | NO: 88) | NO: 97) |
| 33B12 | HV-05 | EVQLVESGGALVQPGGSLRLSCAASGFTFS | SFGMS | YISKSSF | EGGLTM |
| | | SFGMSWVRQAPGKGLEWVSYISKSSFTIYY | (SEQ ID | TIYYAD | VRGVSS |
| | | ADSVKGRFTISRDNAKNSFYLQMNSLRDED | NO: 78) | SVKG | YGLDV |
| | | TAVYYCAREGGLTMVRGVSSYGLDVWGQ | | (SEQ ID | (SEQ ID |
| | | GTTVTVSS (SEQ ID NO: 114) | | NO: 89) | NO: 96) |
| 24G6 | HV-06 | EVQLLESGGGLVQPGGSLRLSCAASGFTFS | SYAMS | AISGSGG | AYTPMA |
| | | SYAMSWVRQAPGKGLEWVSAISGSGGSTY | (SEQ ID | STYYAD | FFDY |
| | | YADSVKGRFTISRDNSKNTLYLQMNSLRAE | NO: 77) | SVKG | (SEQ ID |
| | | DTAVYYCAKAYTPMAFFDYWGQGTLVTV | | (SEQ ID | NO: 98) |
| | | SS (SEQ ID NO: 115) | | NO: 90) | |
| 24A10 | HV-07 | EVQVLESGGGLVQPGGSLRLSCAASGFTFS | NYAMS | AISGSGG | GGWELF |
| | | NYAMSWVRQAPGKGLEWVSAISGSGGSTY | (SEQ ID | STYYAD | Y |
| | | YADSVKGRFTISRDNSKNTLYLQMNSLRAE | NO: 79) | SVKG | (SEQ ID |
| | | DTAVYYCAKGGWELFYWGQGTLVTVSS | | (SEQ ID | NO: 99) |
| | | (SEQ ID NO: 116) | | NO: 90) | |
| 10E3 | HV-08 | EVQLVQSGAEVKKPGESLMISCKGSGYSFT | NYWIG | ITYPGDS | RRQGIW |
| | | NYWIGWVRQMPGKGLEWMGITYPGDSDTR | (SEQ ID | DTRYSP | GDALDI |
| | | YSPSFQGQVTISADKSISTAYLQWSSLKASD | NO: 80) | SFQG | (SEQ ID |
| | | TAMYFCARRRQGIWGDALDIWGQGTLVTV | | (SEQ ID | NO: 100) |
| | | SS (SEQ ID NO: 117) | | NO: 91) | |
| 13E7 | HV-09 | EVQLVQSGAEVKKPGESLMISCKGSGYSFT | SWIG | ITYPGDS | RRQGIW |
| 14C12 | | SYWIGWVRQMPGKGLEWMGITYPGDSDTR | (SEQ ID | DTRYSP | GDALDF |
| | | YSPSFQGQVTISADKSISTAYLQWSSLKASD | NO: 81) | SFQG | (SEQ ID |
| | | TAMYFCARRRQGIWGDALDFWGQGTLVT | | (SEQ ID | NO: 101) |
| | | VSS (SEQ ID NO: 118) | | NO: 91) | |
| 25F12 | HV-10 | QVQLQQWGAGLLKPSETLSLTCAVYGGSF | SYYWS | EINHSG | EGYYDI |
| | | SSYYWSWIRQPPGKGLEWIGEINHSGNTNY | (SEQ ID | NTNYNP | LTGYHD |
| | | NPSLKSRVTISVDTSKNQFSLKLSSVTAADT | NO: 82) | SLKS | AFDI |
| | | AVYYCAREGYYDILTGYHDAFDIWDQGTM | | (SEQ ID | (SEQ ID |
| | | VTVFS (SEQ ID NO: 119) | | NO: 92) | NO: 102) |
| 32E3 | HV-11 | EVQLVQSGAEVKKPGESLKISCKGSGYSFT | SWIG | IIYPGDS | HDIIPAA |
| | | SYWIGWVRQMPGKGLEWMGITYPGDSDTR | (SEQ ID | DTRYSP | PGAFDI |
| | | YSPSFQGQVTISADKSISTAYLQWSTLKASD | NO: 81) | SFQG | (SEQ ID |
| | | TAIYYCARHDIIPAAPGAFDIWGQGTMVTV | | (SEQ ID | NO: 103) |
| | | SS (SEQ ID NO: 120) | | NO: 91) | |
| 24F4 | HV-12 | EVQLVQSGAEVKKPGESLKISCKGSGYTFT | SWIG | IIYPGDS | QAIAVT |
| | | SYWIGWVRQMPGKGLEWMGITYPGDSDTR | (SEQ ID | DTRYSP | GLGGFD |
| | | YSPSFQGQVTISVDKSSSTAYLQWSSLKAS | NO: 81) | SFQG | P |
| | | DTAIYYCTRQAIAVTGLGGFDPWGQGTLV | | (SEQ ID | (SEQ ID |
| | | TVSS (SEQ ID NO: 121) | | NO: 91) | NO: 104) |
| 16B8 | HV-13 | QVQLVQSGAEVKKPGASVKVSCKASGYTF | NYGIS | WISAYN | RGYSYG |
| | | TNYGISWVRQAPGQGLEWMGWISAYNGN | (SEQ ID | GNTNYA | SFDY |
| | | TNYAQKLQGRVTMTTDTSTSTVYMELRSL | NO: 83) | QKLQG | (SEQ ID |
| | | RSDDTAVYYCARRGYSYGSFDYWGQGTL | | (SEQ ID | NO: 105) |
| | | VTVSS (SEQ ID NO: 122) | | NO: 93) | |
| 4C5 | HV-14 | EVQLVQSGAEVKKPGESLKISCKGSGHSFT | NYWIA | IIYPGDS | QRTFYY |
| | | NYWIAWVRQMPGKGLEWMGITYPGDSDTR | (SEQ ID | DTRYSP | DSSGYF |
| | | YSPSFQGQVTISADKSISTAYLQWSSLKASD | NO: 84) | SFQG | DY |
| | | TAVYFCARQRTFYYDSSGYFDYWGQGTLV | | (SEQ ID | (SEQ ID |
| | | TVSS (SEQ ID NO: 123) | | NO: 91) | NO: 106) |
| 6E7 | HV-15 | EVQLVQSGAEVKKPGESLKISCKGSGYSFT | SYWIA | ITYPGDS | QRTFYY |
| | | SYWIAWVRQMPGKGLEWMGITYPGDSDTR | (SEQ ID | DTRYSP | DSSDYF |
| | | YSPSFQGQVTISADKSISTAYLQWSSLKASD | NO: 85) | SFQG | DY |
| | | TAMYFCARQRTFYYDSSDYFDYWGQGTL | | (SEQ ID | (SEQ ID |
| | | VTVSS (SEQ ID NO: 124) | | NO: 91) | NO: 107) |
| 5E3 | HV-16 | QVQLVQSGAEVKKPGASVKVSCKASGYTF | GYYIH | WINPYS | DGGYLA |
| | | TGYYIHWVRQAPGLGLEWMGWINPYSGG | (SEQ ID | GGTTSA | LYGTDV |
| | | TTSAQKFQGRVTMTRDTSISSAYMELSRLR | NO: 86) | QKFQG | (SEQ ID |
| | | SDDTAVYYCARDGGYLALYGTDVWGQGT | | (SEQ ID | NO: 108) |
| | | TVTVSS (SEQ ID NO: 125) | | NO: 94) | |
| 4G10 | HV-17 | EVQLVQSGAEVKKPGESLKISCKGSGYSFP | SYWIA | ITYPGDS | QGIEVT |
| | | SYWIAWVRQMPGKGLEWMGITYPGDSDTR | (SEQ ID | DTRYSP | GTGGLD |
| | | YSPSFQGQVTISADKSISTAFLKWSSLKASD | NO: 85) | SFQG | V |
| | | TAMYFCARQGIEVTGTGGLDVWGQGTTVT | | (SEQ ID | (SEQ ID |
| | | VSS (SEQ ID NO: 126) | | NO: 91) | NO: 109) |

[0110] As noted above, a TREM2 agonist antigen binding protein may comprise one or more of the CDRs presented in TABLE A1 (light chain CDRs; i.e. CDRLs) and TABLE A2 (heavy chain CDRs, i.e. CDRHs).

[0111] In some embodiments, the TREM2 agonist antigen binding protein comprises one or more light chain CDRs selected from (i) a CDRL1 selected from SEQ ID NOS:5 to 18, (ii) a CDRL2 selected from SEQ ID NOS:19 to 30, and (iii) a CDRL3 selected from SEQ ID NOS:31 to 45, and (iv) a CDRL of (i), (ii) and (iii) that contains one or more, e.g., one, two, three, four or more amino acid substitutions (e.g., conservative amino acid substitutions), deletions or insertions of no more than five, four, three, two, or one amino acids. In these and other embodiments, the TREM2 agonist antigen binding proteins comprise one or more heavy chain CDRs selected from (i) a CDRH1 selected from SEQ ID NOS:77 to 86, (ii) a CDRH2 selected from SEQ ID NOS:87 to 94, and (iii) a CDRH3 selected from SEQ ID NOS:95 to 109, and (iv) a CDRH of (i), (ii) and (iii) that contains one or more, e.g., one, two, three, four or more amino acid substitutions (e.g., conservative amino acid substitutions), deletions or insertions of no more than five, four, three, two, or one amino acids amino acids.

[0112] In some embodiments, the TREM2 agonist antigen binding protein may comprise 1, 2, 3, 4, 5, or 6 variant forms of the CDRs listed in TABLES A1 and A2, each having at least 80%, 85%, 90% or 95% sequence identity to a CDR sequence listed in TABLES A1 and A2. In some embodiments, the TREM2 agonist antigen binding protein includes 1, 2, 3, 4, 5, or 6 of the CDRs listed in TABLES A1 and A2, each differing by no more than 1, 2, 3, 4 or 5 amino acids from the CDRs listed in these tables.

[0113] In some embodiments, the TREM2 agonist antigen binding protein comprises a CDRL1 comprising a sequence selected from SEQ ID NOS:5-18 or a variant thereof having one, two, three or four amino acid substitutions; a CDRL2 comprising a sequence selected from SEQ ID NOS: 19-30 or a variant thereof having one, two, three or four amino acid substitutions; a CDRL3 comprising a sequence selected from SEQ ID NOS:31-45 or a variant thereof having one, two, three or four amino acid substitutions; a CDRH1 comprising a sequence selected from SEQ ID NOS:77-86 or a variant thereof having one, two, three or four amino acid substitutions; a CDRH2 comprising a sequence selected from SEQ ID NOS:87-94 or a variant thereof having one, two, three or four amino acid substitutions; and a CDRH3 comprising a sequence selected from SEQ ID NOS:95-109 or a variant thereof having one, two, three or four amino acid substitutions.

[0114] In some embodiments, the TREM2 agonist antigen binding proteins of the invention comprise a CDRL1 comprising a sequence selected from SEQ ID NOS:5-18; a CDRL2 comprising a sequence selected from SEQ ID NOS:19-30; a CDRL3 comprising a sequence selected from SEQ ID NOS:31-45; a CDRH1 comprising a sequence selected from SEQ ID NOS:77-86; a CDRH2 comprising a sequence selected from SEQ ID NOS:87-94; and a CDRH3 comprising a sequence selected from SEQ ID NOS:95-109.

[0115] In some embodiments, the TREM2 agonist antigen binding protein comprise a light chain variable region comprising a CDRL1, a CDRL2, and a CDRL3, wherein:
[0116] (a) CDRL1, CDRL2, and CDRL3 have the sequence of SEQ ID NOS: 5, 19, and 31, respectively;
[0117] (b) CDRL1, CDRL2, and CDRL3 have the sequence of SEQ ID NOS:6, 20, and 32, respectively;
[0118] (c) CDRL1, CDRL2, and CDRL3 have the sequence of SEQ ID NOS:6, 21, and 33, respectively;
[0119] (d) CDRL1, CDRL2, and CDRL3 have the sequence of SEQ ID NOS:6, 20, and 33, respectively;
[0120] (e) CDRL1, CDRL2, and CDRL3 have the sequence of SEQ ID NOS:7, 22, and 34, respectively;
[0121] (f) CDRL1, CDRL2, and CDRL3 have the sequence of SEQ ID NOS:8, 22, and 35, respectively;
[0122] (g) CDRL1, CDRL2, and CDRL3 have the sequence of SEQ ID NOS:9, 22, and 36, respectively;
[0123] (h) CDRL1, CDRL2, and CDRL3 have the sequence of SEQ ID NOS: 10, 23, and 37, respectively;
[0124] (i) CDRL1, CDRL2, and CDRL3 have the sequence of SEQ ID NOS: 11, 23, and 38, respectively;
[0125] (j) CDRL1, CDRL2, and CDRL3 have the sequence of SEQ ID NOS: 12, 24, and 39, respectively;
[0126] (k) CDRL1, CDRL2, and CDRL3 have the sequence of SEQ ID NOS: 13, 25, and 40, respectively;
[0127] (l) CDRL1, CDRL2, and CDRL3 have the sequence of SEQ ID NOS: 14, 26, and 41, respectively;
[0128] (m) CDRL1, CDRL2, and CDRL3 have the sequence of SEQ ID NOS: 15, 27, and 42, respectively;
[0129] (n) CDRL1, CDRL2, and CDRL3 have the sequence of SEQ ID NOS: 16, 28, and 43, respectively;
[0130] (o) CDRL1, CDRL2, and CDRL3 have the sequence of SEQ ID NOS: 17, 29, and 44, respectively, or
[0131] (p) CDRL1, CDRL2, and CDRL3 have the sequence of SEQ ID NOS: 18, 30, and 45, respectively.

[0132] In some embodiments, the TREM2 agonist antigen binding protein comprises a heavy chain variable region comprising a CDRH1, a CDRH2, and a CDRH3, wherein:
[0133] (a) CDRH1, CDRH2, and CDRH3 have the sequence of SEQ ID NOS:77, 87, and 95, respectively;
[0134] (b) CDRH1, CDRH2, and CDRH3 have the sequence of SEQ ID NOS:78, 88, and 96, respectively;
[0135] (c) CDRH1, CDRH2, and CDRH3 have the sequence of SEQ ID NOS:78, 88, and 97, respectively;
[0136] (d) CDRH1, CDRH2, and CDRH3 have the sequence of SEQ ID NOS:78, 89, and 96, respectively;
[0137] (e) CDRH1, CDRH2, and CDRH3 have the sequence of SEQ ID NOS:77, 90, and 98, respectively;
[0138] (f) CDRH1, CDRH2, and CDRH3 have the sequence of SEQ ID NOS:79, 90, and 99, respectively;
[0139] (g) CDRH1, CDRH2, and CDRH3 have the sequence of SEQ ID NOS:80, 91, and 100, respectively;
[0140] (h) CDRH1, CDRH2, and CDRH3 have the sequence of SEQ ID NOS:81, 91, and 101, respectively;
[0141] (i) CDRH1, CDRH2, and CDRH3 have the sequence of SEQ ID NOS:82, 92, and 102, respectively;
[0142] (j) CDRH1, CDRH2, and CDRH3 have the sequence of SEQ ID NOS:81, 91, and 103, respectively;
[0143] (k) CDRH1, CDRH2, and CDRH3 have the sequence of SEQ ID NOS:81, 91, and 104, respectively;
[0144] (l) CDRH1, CDRH2, and CDRH3 have the sequence of SEQ ID NOS:83, 93, and 105, respectively;
[0145] (m) CDRH1, CDRH2, and CDRH3 have the sequence of SEQ ID NOS:84, 91, and 106, respectively;
[0146] (n) CDRH1, CDRH2, and CDRH3 have the sequence of SEQ ID NOS:85, 91, and 107, respectively;
[0147] (o) CDRH1, CDRH2, and CDRH3 have the sequence of SEQ ID NOS:86, 94, and 108, respectively; or
[0148] (p) CDRH1, CDRH2, and CDRH3 have the sequence of SEQ ID NOS:85, 91, and 109, respectively.

[0149] In some embodiments, the TREM2 agonist antigen binding protein comprises a light chain variable region comprising a CDRL1, a CDRL2, and a CDRL3 and a heavy chain variable region comprising a CDRH1, a CDRH2, and a CDRH3, wherein:
[0150] (a) CDRL1, CDRL2, and CDRL3 have the sequence of SEQ ID NOS:5, 19, and 31, respectively, and CDRH1, CDRH2, and CDRH3 have the sequence of SEQ ID NOS:77, 87, and 95, respectively;
[0151] (b) CDRL1, CDRL2, and CDRL3 have the sequence of SEQ ID NOS:6, 20, and 32, respectively, and CDRH1, CDRH2, and CDRH3 have the sequence of SEQ ID NOS:78, 88, and 96, respectively;
[0152] (c) CDRL1, CDRL2, and CDRL3 have the sequence of SEQ ID NOS:6, 21, and 33, respectively, and CDRH1, CDRH2, and CDRH3 have the sequence of SEQ ID NOS:78, 88, and 97, respectively;
[0153] (d) CDRL1, CDRL2, and CDRL3 have the sequence of SEQ ID NOS:6, 20, and 33, respectively, and CDRH1, CDRH2, and CDRH3 have the sequence of SEQ ID NOS:78, 88, and 97, respectively;
[0154] (e) CDRL1, CDRL2, and CDRL3 have the sequence of SEQ ID NOS:6, 20, and 33, respectively, and CDRH1, CDRH2, and CDRH3 have the sequence of SEQ ID NOS:78, 89, and 96, respectively;
[0155] (f) CDRL1, CDRL2, and CDRL3 have the sequence of SEQ ID NOS:7, 22, and 34, respectively, and CDRH1, CDRH2, and CDRH3 have the sequence of SEQ ID NOS:77, 87, and 95, respectively;
[0156] (g) CDRL1, CDRL2, and CDRL3 have the sequence of SEQ ID NOS:8, 22, and 35, respectively, and CDRH1, CDRH2, and CDRH3 have the sequence of SEQ ID NOS:77, 90, and 98, respectively;
[0157] (h) CDRL1, CDRL2, and CDRL3 have the sequence of SEQ ID NOS:9, 22, and 36, respectively, and CDRH1, CDRH2, and CDRH3 have the sequence of SEQ ID NOS:79, 90, and 99, respectively;
[0158] (i) CDRL1, CDRL2, and CDRL3 have the sequence of SEQ ID NOS: 10, 23, and 37, respectively, and CDRH1, CDRH2, and CDRH3 have the sequence of SEQ ID NOS:80, 91, and 100, respectively;
[0159] (j) CDRL1, CDRL2, and CDRL3 have the sequence of SEQ ID NOS: 10, 23, and 37, respectively, and CDRH1, CDRH2, and CDRH3 have the sequence of SEQ ID NOS:81, 91, and 101, respectively;
[0160] (k) CDRL1, CDRL2, and CDRL3 have the sequence of SEQ ID NOS:11, 23, and 38, respectively, and CDRH1, CDRH2, and CDRH3 have the sequence of SEQ ID NOS:82, 92, and 102, respectively;
[0161] (l) CDRL1, CDRL2, and CDRL3 have the sequence of SEQ ID NOS: 12, 24, and 39, respectively, and CDRH1, CDRH2, and CDRH3 have the sequence of SEQ ID NOS:81, 91, and 103, respectively;
[0162] (m) CDRL1, CDRL2, and CDRL3 have the sequence of SEQ ID NOS: 13, 25, and 40, respectively, and CDRH1, CDRH2, and CDRH3 have the sequence of SEQ ID NOS:81, 91, and 104, respectively;
[0163] (n) CDRL1, CDRL2, and CDRL3 have the sequence of SEQ ID NOS: 14, 26, and 41, respectively, and CDRH1, CDRH2, and CDRH3 have the sequence of SEQ ID NOS:83, 93, and 105, respectively;
[0164] (o) CDRL1, CDRL2, and CDRL3 have the sequence of SEQ ID NOS: 15, 27, and 42, respectively, and CDRH1, CDRH2, and CDRH3 have the sequence of SEQ ID NOS:84, 91, and 106, respectively;
[0165] (p) CDRL1, CDRL2, and CDRL3 have the sequence of SEQ ID NOS: 16, 28, and 43, respectively, and CDRH1, CDRH2, and CDRH3 have the sequence of SEQ ID NOS:85, 91, and 107, respectively;
[0166] (q) CDRL1, CDRL2, and CDRL3 have the sequence of SEQ ID NOS: 17, 29, and 44, respectively, and CDRH1, CDRH2, and CDRH3 have the sequence of SEQ ID NOS:86, 94, and 108, respectively; or
[0167] (r) CDRL1, CDRL2, and CDRL3 have the sequence of SEQ ID NOS:18, 30, and 45, respectively, and CDRH1, CDRH2, and CDRH3 have the sequence of SEQ ID NOS:85, 91, and 109, respectively.

[0168] In some embodiments, the TREM2 agonist antigen binding protein comprises a light chain variable region comprising a CDRL1, a CDRL2, and a CDRL3 and a heavy chain variable region comprising a CDRH1, a CDRH2, and a CDRH3, wherein CDRL1, CDRL2, and CDRL3 have the sequence of SEQ ID NOS:10, 23, and 37, respectively, and CDRH1, CDRH2, and CDRH3 have the sequence of SEQ ID NOS:80, 91, and 100, respectively. In some embodiments, the TREM2 agonist antigen binding protein comprises a light chain variable region comprising a CDRL1, a CDRL2, and a CDRL3 and a heavy chain variable region comprising a CDRH1, a CDRH2, and a CDRH3, wherein CDRL1, CDRL2, and CDRL3 have the sequence of SEQ ID NOS:10, 23, and 37, respectively, and CDRH1, CDRH2, and CDRH3 have the sequence of SEQ ID NOS:81, 91, and 101, respectively. In some embodiments, the TREM2 agonist antigen binding protein comprises a light chain variable region comprising a CDRL1, a CDRL2, and a CDRL3 and a heavy chain variable region comprising a CDRH1, a CDRH2, and a CDRH3, wherein CDRL1, CDRL2, and CDRL3 have the sequence of SEQ ID NOS: 15, 27, and 42, respectively, and CDRH1, CDRH2, and CDRH3 have the sequence of SEQ ID NOS:84, 91, and 106, respectively. In some embodiments, the TREM2 agonist antigen binding protein comprises a light chain variable region comprising a CDRL1, a CDRL2, and a CDRL3 and a heavy chain variable region comprising a CDRH1, a CDRH2, and a CDRH3, wherein CDRL1, CDRL2, and CDRL3 have the sequence of SEQ ID NOS:16, 28, and 43, respectively, and CDRH1, CDRH2, and CDRH3 have the sequence of SEQ ID NOS:85, 91, and 107, respectively. In some embodiments, the TREM2 agonist antigen binding protein comprises a light chain variable region comprising a CDRL1, a CDRL2, and a CDRL3 and a heavy chain variable region comprising a CDRH1, a CDRH2, and a CDRH3, wherein CDRL1, CDRL2, and CDRL3 have the sequence of SEQ ID NOS:17, 29, and 44, respectively, and CDRH1, CDRH2, and CDRH3 have the sequence of SEQ ID NOS:86, 94, and 108, respectively. In some embodiments, the TREM2 agonist antigen binding protein comprises a light chain variable region comprising a CDRL1, a CDRL2, and a CDRL3 and a heavy chain variable region comprising a CDRH1, a CDRH2, and a CDRH3, wherein CDRL1, CDRL2, and CDRL3 have the sequence of SEQ ID NOS:8, 22, and 35, respectively, and CDRH1, CDRH2, and CDRH3 have the sequence of SEQ ID NOS:77, 90, and 98, respectively.

[0169] In some embodiments, the TREM2 agonist antigen binding proteins comprise a light chain variable region comprising a sequence selected from SEQ ID NOS:46-63 and a heavy chain variable region comprising a sequence selected from SEQ ID NOS: 110-126.In some embodiments, the TREM2 agonist antigen binding protein comprises a light chain variable region comprising the sequence of SEQ ID NO:46 and a heavy chain variable region comprising the sequence of SEQ ID NO:110. In some embodiments, the TREM2 agonist antigen binding protein comprises a light chain variable region comprising the sequence of SEQ ID NO:47 and a heavy chain variable region comprising the sequence of SEQ ID NO:111. In some embodiments, the TREM2 agonist antigen binding protein comprises a light chain variable region comprising the sequence of SEQ ID NO:48 and a heavy chain variable region comprising the sequence of SEQ ID NO: 112. In some embodiments, the TREM2 agonist antigen binding protein comprises a light chain variable region comprising the sequence of SEQ ID NO:49 and a heavy chain variable region comprising the sequence of SEQ ID NO: 113. In some embodiments, the TREM2 agonist antigen binding protein comprises a light chain variable region comprising the sequence of SEQ ID NO:50 and a heavy chain variable region comprising the sequence of SEQ ID NO:114. In some embodiments, the TREM2 agonist antigen binding protein comprises a light chain variable region comprising the sequence of SEQ ID NO:51 and a heavy chain variable region comprising the sequence of SEQ ID NO: 110. In some embodiments, the TREM2 agonist antigen binding protein comprises a light chain variable region comprising the sequence of SEQ ID NO:53 and a heavy chain variable region comprising the sequence of SEQ ID NO: 116. In some embodiments, the TREM2 agonist antigen binding protein comprises a light chain variable region comprising the sequence of SEQ ID NO:54 and a heavy chain variable region comprising the sequence of SEQ ID NO: 117. In some embodiments, the TREM2 agonist antigen binding protein comprises a light chain variable region comprising the sequence of SEQ ID NO:55 and a heavy chain variable region comprising the sequence of SEQ ID NO:118. In some embodiments, the TREM2 agonist antigen binding protein comprises a light chain variable region comprising the sequence of SEQ ID NO:56 and a heavy chain variable region comprising the sequence of SEQ ID NO: 119. In some embodiments, the TREM2 agonist antigen binding protein comprises a light chain variable region comprising the sequence of SEQ ID NO:57 and a heavy chain variable region comprising the sequence of SEQ ID NO: 120. In some embodiments, the TREM2 agonist antigen binding protein comprises a light chain variable region comprising the sequence of SEQ ID NO:58 and a heavy chain variable region comprising the sequence of SEQ ID NO:121. In some embodiments, the TREM2 agonist antigen binding protein comprises a light chain variable region comprising the sequence of SEQ ID NO:59 and a heavy chain variable region comprising the sequence of SEQ ID NO:122. In some embodiments, the TREM2 agonist antigen binding protein comprises a light chain variable region comprising the sequence of SEQ ID NO:60 and a heavy chain variable region comprising the sequence of SEQ ID NO: 123. In some embodiments, the TREM2 agonist antigen binding protein comprises a light chain variable region comprising the sequence of SEQ ID NO:61 and a heavy chain variable region comprising the sequence of SEQ ID NO: 124. In some embodiments, the TREM2 agonist antigen binding protein comprises a light chain variable region comprising the sequence of SEQ ID NO:62 and a heavy chain variable region comprising the sequence of SEQ ID NO: 125. In some embodiments, the TREM2 agonist antigen binding protein comprises a light chain variable region comprising the sequence of SEQ ID NO:63 and a heavy chain variable region comprising the sequence of SEQ ID NO:126. In yet another embodiment, the TREM2 agonist antigen binding protein comprises a light chain variable region comprising the sequence of SEQ ID NO:52 and a heavy chain variable region comprising the sequence of SEQ ID NO:115.

[0170] In some embodiments, the TREM2 agonist antigen binding protein may comprise a light chain variable region selected from LV-01, LV-02, LV-03, LV-04, LV-05, LV-06, LV-07, LV-08, LV-09, LV-10, LV-11, LV-12, LV-13, LV-14, LV-15, LV-16, LV-17, and LV-18, as shown in TABLE A1, and/or a heavy chain variable region selected from HV-01, HV-02, HV-03, HV-04, HV-05, HV-06, HV-07, HV-08, HV-09, HV-10, HV-11, HV-12, HV-13, HV-14, HV-15, HV-16, and HV-17, as shown in TABLE A2, and functional fragments, derivatives, muteins and variants of these light chain and heavy chain variable regions.

[0171] In some embodiments, each of the light chain variable regions listed in TABLE Almay be combined with any of the heavy chain variable regions listed in TABLE A2 to form an anti-TREM2 binding domain of the antigen binding proteins of the invention. Examples of such combinations include, but are not limited to: LV-01 (SEQ ID NO:46) and HV-01 (SEQ ID NO: 110); LV-02 (SEQ ID NO:47) and HV-02 (SEQ ID NO: 111); LV-03 (SEQ ID NO:48) and HV-03 (SEQ ID NO: 112); LV-04 (SEQ ID NO:49) and HV-04 (SEQ ID NO: 113); LV-05 (SEQ ID NO:50) and HV-05 (SEQ ID NO: 114); LV-06 (SEQ ID NO:51) and HV-0 (SEQ ID NO:110); LV-07 (SEQ ID NO:52) and HV-06 (SEQ ID NO: 115); LV-08 (SEQ ID NO:53) and HV-07 (SEQ ID NO: 116); LV-09 (SEQ ID NO:54) and HV-08 (SEQ ID NO: 117); LV-10 (SEQ ID NO:55) and HV-09 (SEQ ID NO: 118); LV-11 (SEQ ID NO:56) and HV-10 (SEQ ID NO: 119); LV-12 (SEQ ID NO:57) and HV-11 (SEQ ID NO: 120); LV-13 (SEQ ID NO:58) and HV-12 (SEQ ID NO:121); LV-14 (SEQ ID NO:59) and HV-13 (SEQ ID NO: 122); LV-15 (SEQ ID NO:60) and HV-14 (SEQ ID NO: 123); LV-16 (SEQ ID NO:61) and HV-15 (SEQ ID NO: 124); LV-17 (SEQ ID NO:62) and HV-16 (SEQ ID NO: 125); and LV-18 (SEQ ID NO:63) and HV-17 (SEQ ID NO: 126).

[0172] In certain embodiments, the TREM2 agonist antigen binding proteins of the invention comprise a light chain variable region comprising the sequence of LV-09 (SEQ ID NO:54) and a heavy chain variable region comprising the sequence of HV-08 (SEQ ID NO: 117). In some embodiments, the TREM2 agonist antigen binding proteins of the invention comprise a light chain variable region comprising the sequence of LV-10 (SEQ ID NO:55) and a heavy chain variable region comprising the sequence of HV-09 (SEQ ID NO: 118). In other embodiments, the TREM2 agonist antigen binding proteins of the invention comprise a light chain variable region comprising the sequence of LV-15 (SEQ ID NO:60) and a heavy chain variable region comprising the sequence of HV-14 (SEQ ID NO: 123). In still other embodiments, the TREM2 agonist antigen binding proteins of the invention comprise a light chain variable region comprising the sequence of LV-16 (SEQ ID NO:61) and a heavy chain variable region comprising the sequence of HV-15 (SEQ ID NO: 124). In some embodiments, the TREM2 agonist antigen binding proteins of the invention comprise a light chain variable region comprising the sequence of LV-17 (SEQ ID NO:62) and a heavy chain variable region comprising the sequence of HV-16 (SEQ ID NO: 125). In certain embodiments, the TREM2 agonist antigen binding proteins of the invention comprise a light chain variable region comprising the sequence of LV-07 (SEQ ID NO:52) and a heavy chain variable region comprising the sequence of HV-06 (SEQ ID NO: 115).

[0173] In some embodiments, the TREM2 agonist antigen binding proteins comprise a light chain variable region comprising a sequence of contiguous amino acids that differs from the sequence of a light chain variable region in TABLE A1, i.e. a VL selected from LV-01, LV-02, LV-03, LV-04, LV-05, LV-06, LV-07, LV-08, LV-09, LV-10, LV-11, LV-12, LV-13, LV-14, LV-15, LV-16, LV-17, or LV-18, at only 1, 2, 3, 4, 5, 6, 7, 8, 9, 10, 11, 12, 13, 14 or 15 amino acid residues, wherein each such sequence difference is independently either a deletion, insertion or substitution of one amino acid, with the deletions, insertions and/or substitutions resulting in no more than 15 amino acid changes relative to the foregoing variable domain sequences. The light chain variable region in some TREM2 agonist antigen binding proteins comprises a sequence of amino acids that has at least 70%, at least 75%, at least 80%, at least 85%, at least 90%, at least 95%, at least 97% or at least 99% sequence identity to the amino acid sequences of SEQ ID NOS:46-63 (i.e. the light chain variable regions in TABLE A1). In one embodiment, the TREM2 agonist antigen binding protein comprises a light chain variable region comprising a sequence that is at least 90% identical to a sequence selected from SEQ ID NOS:46-63. In another embodiment, the TREM2 agonist antigen binding protein comprises a light chain variable region comprising a sequence that is at least 95% identical to a sequence selected from SEQ ID NOS:46-63. In yet another embodiment, the TREM2 agonist antigen binding protein comprises a light chain variable region comprising a sequence selected from SEQ ID NOS:46-63. In some embodiments, the TREM2 agonist antigen binding protein comprises a light chain variable region comprising a sequence of SEQ ID NO:54. In other embodiments, the TREM2 agonist antigen binding protein comprises a light chain variable region comprising a sequence of SEQ ID NO:55. In yet other embodiments, the TREM2 agonist antigen binding protein comprises a light chain variable region comprising a sequence of SEQ ID NO:60. In still other embodiments, the TREM2 agonist antigen binding protein comprises a light chain variable region comprising a sequence of SEQ ID NO:61. In certain embodiments, the TREM2 agonist antigen binding protein comprises a light chain variable region comprising a sequence of SEQ ID NO:62. In other embodiments, the TREM2 agonist antigen binding protein comprises a light chain variable region comprising a sequence of SEQ ID NO:52.

[0174] In these and other embodiments, the TREM2 agonist antigen binding proteins comprise a heavy chain variable region comprising a sequence of contiguous amino acids that differs from the sequence of a heavy chain variable region in TABLE A2, i.e., a VH selected from HV-01, HV-02, HV-03, HV-04, HV-05, HV-06, HV-07, HV-08, HV-09, HV-10, HV-11, HV-12, HV-13, HV-14, HV-15, HV-16, or HV-17, at only 1, 2, 3, 4, 5, 6, 7, 8, 9, 10, 11, 12, 13, 14 or 15 amino acid residues, wherein each such sequence difference is independently either a deletion, insertion or substitution of one amino acid, with the deletions, insertions and/or substitutions resulting in no more than 15 amino acid changes relative to the foregoing variable domain sequences. The heavy chain variable region in some TREM2 agonist antigen binding proteins comprises a sequence of amino acids that has at least 70%, at least 75%, at least 80%, at least 85%, at least 90%, at least 95%, at least 97% or at least 99% sequence identity to the amino acid sequences of SEQ ID NOS:110-126 (i.e. the heavy chain variable regions in TABLE A2). In one embodiment, the TREM2 agonist antigen binding protein comprises a heavy chain variable region comprising a sequence that is at least 90% identical to a sequence selected from SEQ ID NOS: 110-126. In another embodiment, the TREM2 agonist antigen binding protein comprises a heavy chain variable region comprising a sequence that is at least 95% identical to a sequence selected from SEQ ID NOS: 110-126. In yet another embodiment, the TREM2 agonist antigen binding protein comprises a heavy chain variable region comprising a sequence selected from SEQ ID NOS: 110-126. In some embodiments, the TREM2 agonist antigen binding protein comprises a heavy chain variable region comprising a sequence of SEQ ID NO: 117. In other embodiments, the TREM2 agonist antigen binding protein comprises a heavy chain variable region comprising a sequence of SEQ ID NO: 118. In yet other embodiments, the TREM2 agonist antigen binding protein comprises a heavy chain variable region comprising a sequence of SEQ ID NO:123. In still other embodiments, the TREM2 agonist antigen binding protein comprises a heavy chain variable region comprising a sequence of SEQ ID NO: 124. In certain embodiments, the TREM2 agonist antigen binding protein comprises a heavy chain variable region comprising a sequence of SEQ ID NO:125. In other embodiments, the TREM2 agonist antigen binding protein comprises a heavy chain variable region comprising a sequence of SEQ ID NO: 115.

[0175] In some embodiments, variants of the anti-TREM2 antibodies can be generated by substituting one or more amino acids in the light chain or heavy chain variable regions to address chemical liabilities (e.g., aspartate isomerization, asparagine deamidation, tryptophan and methionine oxidation) or correct covariance violations (see e.g., WO 2012/125495, which is hereby incorporated by reference in its entirety). Such variants can have improved biophysical, expression, and/or stability properties as compared with the parental antibody. In some embodiments, the TREM2 agonist antigen binding proteins of the invention comprise a light chain variable region and/or heavy chain variable region having one or more of the amino acid substitutions set forth in any of TABLES A3-A4 below.

[0176] In some embodiments, additional variants of the anti-TREM2 antibodies described herein can be generated by affinity modulating any of the anti-TREM2 antibodies described herein. An “affinity-modulated antibody” is an antibody that comprises one or more amino acid substitutions in its light chain variable region sequence and/or heavy chain variable region sequence that increases or decreases the affinity of the antibody for the target antigen as compared to the parental antibody that does not contain the amino acid substitutions. Antibody affinity modulation methods are known to those of skill in the art and can include CDR walking mutagenesis (Yang et al., J. Mol. Biol., 254, 392-403, 1995), chain shuffling (Marks et al., Bio/Technology, 10, 779-783, 1992), use of mutation strains of E. coli (Low et al., J. Mol. Biol., 250, 350-368, 1996), DNA shuffling (Patten et al., Curr. Opin. Biotechnol., 1997, 8:724-733), phage display (Thompson et al., J. Mol. Biol., 1996, 256:7-88), PCR techniques (Crameri, et al., Nature, 1998, 391:288-291), and other mutagenesis strategies (Barbas et al., Proc Nat. Acad. Sci. USA 91:3809-3813, 1994; Schier et al., Gene 169:147-155, 1995; Yelton et al., J. Immunol. 155:1994-2004, 1995; Jackson et al., J. Immunol. 154(7):3310-9, 1995; and Hawkins et al., J. Mol. Biol., 1992, 226:889-896). Methods of affinity modulation are discussed in Hoogenboom, Trends in Biotechnology, 1995, 15:62-70, and Vaughan et al., Nature Biotechnology, 1998, 16535-539,. One specific method for generating affinity-modulated variants of the anti-TREM2 antibodies described herein is the use of a yeast-display Fab mutagenesis library.

[0177] In some embodiments, the TREM2 agonist antigen binding proteins comprise a light chain variable region that is a variant of a light chain variable region of any of the anti-TREM2 antibodies described herein. Thus, in some embodiments, the light chain variable region of the TREM2 agonist antigen binding proteins comprises a sequence that is at least 90% identical, at least 91% identical, at least 92% identical, at least 93% identical, at least 94% identical, or at least 95% identical to a sequence selected from SEQ ID NOS:46-63. In some embodiments, the TREM2 agonist antigen binding proteins can comprise a light chain variable region from any of the engineered anti-TREM2 antibody variants set forth in TABLES A3-A4 below.

[0178] In some embodiments, the TREM2 agonist antigen binding protein comprises a light chain variable region comprising the sequence of SEQ ID NO:54 with a mutation at one or more amino acid positions 64, 79, 80, 85, 94, and/or 100. In some such embodiments, the mutation is V64G, V64A, Q79E, Q79D, S80P, S80A, F85V, F85L, F85A, F85D, F85I, F85L, F85M, F85T, W94F, W94Y, W94S, W94T, W94A, W94H, W94I, W94Q, P100R, P100Q, P100G, or combinations thereof. In another embodiment, the TREM2 agonist antigen binding protein comprises a light chain variable region comprising the sequence of SEQ ID NO:55 with a mutation at one or more amino acid positions 64, 79, 80, 94, and/or 100. Such mutations can include V64G, V64A, Q79E, Q79D, S80P, S80A, W94F, W94Y, W94S, W94T, W94A, W94H, W94I, W94Q, P100R, P100Q, P100G, or combinations thereof. In certain embodiments, the mutation is V64G, V64A, Q79E, S80P, S80A, W94Y, W94S, P100R, P100Q, or combinations thereof. In another embodiment, the TREM2 agonist antigen binding protein comprises a light chain variable region comprising the sequence of SEQ ID NO:60 with a mutation at one or more amino acid positions 60, 92, and/or 93. The mutation in such embodiments can be selected from L60S, L60P, L60D, L60A, D92E, D92Q, D92T, D92N, S93A, S93N, S93Q, S93V, or combinations thereof. In yet another embodiment, the TREM2 agonist antigen binding protein comprises a light chain variable region comprising the sequence of SEQ ID NO:61 with a mutation at one or more amino acid positions 56, 57, 92, and/or 93. In such embodiments, the mutation can be N56S, N56T, N56Q, N56E, G57A, G57V, D92E, D92Q, D92T, D92N, S93A, S93N, S93Q, S93V, or combinations thereof. In certain embodiments, the mutation is N56S, N56Q, G57A, D92E, D92Q, S93A, or combinations thereof. In still another embodiment, the TREM2 agonist antigen binding protein comprises a light chain variable region comprising the sequence of SEQ ID NO:62 with a mutation at amino acid position 36, 46, 61 and/or 100. Such mutations can include F36Y, S46L, S46R, S46V, S46F, K61R, P100Q, P100G, P100R or combinations thereof. In particular embodiments, the mutation is F36Y, K61R, P100Q, or combinations thereof. In another embodiment, the TREM2 agonist antigen binding protein comprises a light chain variable region comprising the sequence of SEQ ID NO:52 with a mutation at amino acid position 91, which can be selected from F91V, F91I, F91T, F91L, or F91D. In one embodiment, the mutation is F91V.

[0179] In some embodiments, the TREM2 agonist antigen binding proteins comprise a heavy chain variable region that is a variant of a heavy chain variable region from any of the anti-TREM2 antibodies described herein. Thus, in some embodiments, the heavy chain variable region of the TREM2 agonist antigen binding proteins comprises a sequence that is at least 90% identical, at least 91% identical, at least 92% identical, at least 93% identical, at least 94% identical, or at least 95% identical to a sequence selected from SEQ ID NOS:110-126. For instance, the TREM2 agonist antigen binding proteins can comprise a heavy chain variable region from any of the engineered anti-TREM2 antibody variants set forth in TABLES A3-A4 below. In one embodiment, the TREM2 agonist antigen binding protein comprises a heavy chain variable region comprising the sequence of SEQ ID NO: 117 with a mutation at one or more amino acid positions 19, 55, 56, 57, 58, and/or 104. In some such embodiments, the mutation is M19K, M19R, M19T, M19E, M19N, M19Q, D55E, D55Q, D55N, D55T, S56A, S56Q, S56V, D57S, D57E, D57Q, T58A, T58V, W104F, W104Y, W104T, W104S, W104A, W104H, W1041, W104Q, or combinations thereof. In another embodiment, the TREM2 agonist antigen binding protein comprises a heavy chain variable region comprising the sequence of SEQ ID NO:118 with a mutation at one or more amino acid positions 19, 55, 56, 57, 58, and/or 104. Such mutations can include M19K, M19R, M19T, M19E, M19N, M19Q, D55E, D55Q, D55N, D55T, S56A, S56Q, S56V, D57S, D57E, D57Q, T58A, T58V, W104F, W104Y, W104T, W104S, W104A, W104H, W1041, W104Q, or combinations thereof. In certain embodiments, the mutation is M19K, D55E, S56A, D57E, T58A, W104Y, W104T, or combinations thereof. In another embodiment, the TREM2 agonist antigen binding protein comprises a heavy chain variable region comprising the sequence of SEQ ID NO:123 with a mutation at one or more amino acid positions 27, 55, 56, 57, 58, 105, and/or 106. In some embodiments, the mutation is selected from H27Y, H27D, H27F, H27N, D55E, D55Q, D55N, D55T, S56A, S56Q, S56V, D57S, D57E, D57Q, T58A, T58V, D105E, D105Q, D105T, D105N, D105G, S106A, S106Q, S106V, S106T, or combinations thereof. In yet another embodiment, the TREM2 agonist antigen binding protein comprises a heavy chain variable region comprising the sequence of SEQ ID NO:124 with a mutation at one or more amino acid positions 55, 56, 57, 58, 105, and/or 106. The mutation in such embodiments can be selected from D55E, D55Q, D55N, D55T, S56A, S56Q, S56V, D57S, D57E, D57Q, T58A, T58V, D105E, D105Q, D105T, D105N, D105G, S106A, S106Q, S106V, S106T, or combinations thereof. In certain embodiments, the mutation is D55E, D55Q, S56A, D57E, T58A, D105E, D105N, S106A, or combinations thereof. In still another embodiment, the TREM2 agonist antigen binding protein comprises a heavy chain variable region comprising the sequence of SEQ ID NO: 125 with a mutation at one or more amino acid positions 43, 76, 85, 99, 100, and/or 116. Such mutations can include L43Q, L43K, L43H, I76T, R85S, R85G, R85N, R85D, D99E, D99Q, D99S, D99T, G100A, G100Y, G100V, T116L, T116M, T116P, T116R, or combinations thereof. In certain embodiments, the mutation is L43Q, R85S, D99E, G100A, G100Y, Ti 16L, or combinations thereof. In another embodiment, the TREM2 agonist antigen binding protein comprises a heavy chain variable region comprising the sequence of SEQ ID NO: 115 with a mutation at amino acid position 62 and/or 63. In such embodiments, the mutation can be selected from D62E, D62Q, D62T, D62N, S63A, S63Q, S63V, or combinations thereof. In some embodiments, the mutation is D62E, D62Q, S63A, or combinations thereof. In some embodiments, the TREM2 agonist antigen binding proteins comprise a light chain variable region and/or heavy chain variable region from any of the anti-TREM2 variant antibodies set forth in TABLES A3, A4, A4, A5, A6, A7, and A8. Accordingly, in some embodiments, the light chain variable region of the TREM2 agonist antigen binding proteins comprises a sequence that is at least 90% identical, at least 91% identical, at least 92% identical, at least 93% identical, at least 94% identical, or at least 95% identical to a sequence selected from SEQ ID NOS:61, 153-162, and 295-300. In these and other embodiments, the heavy chain variable region of the TREM2 agonist antigen binding proteins comprises a sequence that is at least 90% identical, at least 91% identical, at least 92% identical, at least 93% identical, at least 94% identical, or at least 95% identical to a sequence selected from SEQ ID NOS: 124, 180-190, and 307-312.

[0180] In some embodiments, the TREM2 agonist antigen binding protein comprises a light chain variable region comprising the sequence of SEQ ID NO:54 with a mutation at one or more amino acid positions 64, 79, 80, 85, 94, and/or 100. Such mutations can include V64G, V64A, Q79E, Q79D, S80P, S80A, F85V, F85L, F85A, F85D, F85I, F85L, F85M, F85T, W94F, W94Y, W94S, W94T, W94A, W94H, W94I, W94Q, P100R, P100Q, P100G, or combinations thereof. In these and other embodiments, the TREM2 agonist antigen binding protein comprises a heavy chain variable region comprising the sequence of SEQ ID NO: 117 with a mutation at one or more amino acid positions 19, 55, 56, 57, 58, and/or 104. In certain embodiments, the mutation is selected from M19K, M19R, M19T, M19E, M19N, M19Q, D55E, D55Q, D55N, D55T, S56A, S56Q, S56V, D57S, D57E, D57Q, T58A, T58V, W104F, W104Y, W104T, W104S, W104A, W104H, W1041, W104Q, or combinations thereof.

[0181] In other embodiments, the TREM2 agonist antigen binding protein comprises a light chain variable region comprising the sequence of SEQ ID NO:55 with a mutation at one or more amino acid positions 64, 79, 80, 94, and/or 100. In some embodiments, the mutation is selected from V64G, V64A, Q79E, Q79D, S80P, S80A, W94F, W94Y, W94S, W94T, W94A, W94H, W94I, W94Q, P100R, P100Q, P100G, or combinations thereof. In certain embodiments, the mutation is selected from V64G, V64A, Q79E, S80P, S80A, W94Y, W94S, P100R, P100Q, or combinations thereof. For instance, in some embodiments, the TREM2 agonist antigen binding protein comprises a light chain variable region comprising the sequence of SEQ ID NO:55 with one or more mutations selected from V64G, Q79E, S80P, W94Y, and P100Q. In these and other embodiments, the TREM2 agonist antigen binding protein comprises a heavy chain variable region comprising the sequence of SEQ ID NO: 118 with a mutation at one or more amino acid positions 19, 55, 56, 57, 58, and/or 104. Such mutations can include M19K, M19R, M19T, M19E, M19N, M19Q, D55E, D55Q, D55N, D55T, S56A, S56Q, S56V, D57S, D57E, D57Q, T58A, T58V, W104F, W104Y, W104T, W104S, W104A, W104H, W1041, W104Q, or combinations thereof. In certain embodiments, the mutation is selected from M19K, D55E, S56A, D57E, T58A, W104Y, W104T, or combinations thereof.

[0182] In certain other embodiments, the TREM2 agonist antigen binding protein comprises a light chain variable region comprising the sequence of SEQ ID NO:60 with a mutation at one or more amino acid positions 60, 92, and/or 93. The mutation can be selected from L60S, L60P, L60D, L60A, D92E, D92Q, D92T, D92N, S93A, S93N, S93Q, S93V, or combinations thereof. In these and other embodiments, the TREM2 agonist antigen binding protein comprises a heavy chain variable region comprising the sequence of SEQ ID NO: 123 with a mutation at one or more amino acid positions 27, 55, 56, 57, 58, 105, and/or 106. In some embodiments, the mutation is selected from H27Y, H27D, H27F, H27N, D55E, D55Q, D55N, D55T, S56A, S56Q, S56V, D57S, D57E, D57Q, T58A, T58V, D105E, D105Q, D105T, D105N, D105G, S106A, S106Q, S106V, S106T, or combinations thereof.

[0183] In some embodiments, the TREM2 agonist antigen binding protein comprises a light chain variable region comprising the sequence of SEQ ID NO:61 with a mutation at one or more amino acid positions 56, 57, 92, and/or 93. In certain embodiments, the mutation is selected from N56S, N56T, N56Q, N56E, G57A, G57V, D92E, D92Q, D92T, D92N, S93A, S93N, S93Q, S93V, or combinations thereof. In some embodiments, the mutation is selected from N56S, N56Q, G57A, D92E, D92Q, S93A, or combinations thereof. In particular embodiments, the TREM2 agonist antigen binding protein comprises a light chain variable region comprising the sequence of SEQ ID NO:61 with one or more mutations selected from N56S, D92E, and S93A. In these and other embodiments, the TREM2 agonist antigen binding protein comprises a heavy chain variable region comprising the sequence of SEQ ID NO: 124 with a mutation at one or more amino acid positions 55, 56, 57, 58, 105, and/or 106. The mutation can be selected from D55E, D55Q, D55N, D55T, S56A, S56Q, S56V, D57S, D57E, D57Q, T58A, T58V, D105E, D105Q, D105T, D105N, D105G, S106A, S106Q, S106V, S106T, or combinations thereof. In certain embodiments, the mutation is D55E, D55Q, S56A, D57E, T58A, D105E, D105N, S106A, or combinations thereof. In some embodiments, the TREM2 agonist antigen binding protein comprises a heavy chain variable region comprising the sequence of SEQ ID NO: 124 with one or more mutations selected from D55E, S56A, D57E, D105E, and S106A.

[0184] In other embodiments, the TREM2 agonist antigen binding protein comprises a light chain variable region comprising the sequence of SEQ ID NO:62 with a mutation at amino acid position 36, 46, 61 and/or 100. In particular embodiments, the mutation is selected from F36Y, S46L, S46R, S46V, S46F, K61R, P100Q, P100G, P100R or combinations thereof. In some embodiments, the mutation is F36Y, K61R, P100Q, or combinations thereof. In some embodiments, the mutation is S46L, P100Q, or combinations thereof. In these and other embodiments, the TREM2 agonist antigen binding protein comprises a heavy chain variable region comprising the sequence of SEQ ID NO: 125 with a mutation at one or more amino acid positions 43, 76, 85, 99, 100, and/or 116. The mutation can be selected from L43Q, L43K, L43H, I76T, R85S, R85G, R85N, R85D, D99E, D99Q, D99S, D99T, G100A, G100Y, G100V, T116L, T116M, T116P, T116R, or combinations thereof. In certain embodiments, the mutation is L43Q, I76T, R85S, D99E, G100A, G100Y, Ti16L, or combinations thereof.

[0185] In still other embodiments, the TREM2 agonist antigen binding protein comprises a light chain variable region comprising the sequence of SEQ ID NO:52 with a mutation at amino acid position 91. The mutation can be selected from F91V, F91I, F91T, F91L, or F91D. In one embodiment, the mutation is F91V. In these and other embodiments, the TREM2 agonist antigen binding protein comprises a heavy chain variable region comprising the sequence of SEQ ID NO:115 with a mutation at amino acid position 62 and/or 63. In particular embodiments, the mutation is selected from D62E, D62Q, D62T, D62N, S63A, S63Q, S63V, or combinations thereof. In some embodiments, the mutation is selected from D62E, D62Q, S63A, or combinations thereof.

TABLE A3
Engineered Variants of 10E3 Antibody

| | | | | |
|---|---|---|---|---|
| Position in 10E3 | | | | |
| VL Sequence or | | | Parent Amino | Amino Acid |
| VH sequence | Region | Hot Spot | Acid | Substitutions |

Light chain variable sequence (SEQ ID NO: 54)

| | | | | |
|---|---|---|---|---|
| 64 | FR3 | Covariance violator | V | G, A |
| 79 | FR3 | Covariance violator | Q | E, D |
| 80 | FR3 | Covariance violator | S | P, A |
| 85 | FR3 | Covariance violator | F | V, L, A, D, I, L, M, T |
| 94 | CDR3 | Potential Tryptophan | W | F, Y, S, T, A, H, I, Q |
| | | Oxidation Site | | |
| 100 | FR4 | Covariance violator | P | R, Q, G |

Heavy chain variable sequence (SEQ ID NO: 117)

| | | | | |
|---|---|---|---|---|
| 19 | FR1 | Covariance violator | M | K, R, T, E, N, Q |
| 55-56 | CDR2 | Potential Isomerization Site | DS | ES, QS, DA, NS, DQ, |
| | | | | TS, DV |
| 57-58 | CDR2 | Potential Isomerization Site | DT | ST, ET, DA, DV, QT |
| 104 | CDR3 | Potential Tryptophan | W | F, Y, T, S, A, H, I, Q |
| | | Oxidation Site | | |

TABLE A4
Engineered Variants of 13E7 Antibody

| | | | | |
|---|---|---|---|---|
| Position in 13E7 | | | | |
| VL Sequence or | | | Parent Amino | Amino Acid |
| VH sequence | Region | Hot Spot | Acid | Substitutions |

Light chain variable sequence (SEQ ID NO: 55)

| | | | | |
|---|---|---|---|---|
| 64 | FR3 | Covariance violator | V | G, A |
| 79 | FR3 | Covariance violator | Q | E, D |
| 80 | FR3 | Covariance violator | S | P, A |
| 94 | CDR3 | Potential Tryptophan | W | F, Y, S, T, A, H, I, Q |
| | | Oxidation Site | | |
| 100 | FR4 | Covariance violator | P | R, Q, G |

Heavy chain variable sequence (SEQ ID NO: 118)

| | | | | |
|---|---|---|---|---|
| 19 | FR1 | Covariance violator | M | K, R, T, E, N, Q |
| 55-56 | CDR2 | Potential Isomerization Site | DS | ES, QS, DA, DQ, NS, |
| | | | | TS, DV |
| 57-58 | CDR2 | Potential Isomerization Site | DT | ST, ET, DA, DV, QT |
| 104 | CDR3 | Potential Tryptophan | W | F, Y, T, S, A, H, I, Q |
| | | Oxidation Site | | |

TABLE A5
Engineered Variants of 4C5 Antibody

| | | | | |
|---|---|---|---|---|
| Position in 4C5 | | | | |
| VL Sequence or | | | Parent Amino | Amino Acid |
| VH sequence | Region | Hot Spot | Acid | Substitutions |

Light chain variable sequence (SEQ ID NO: 60)

| | | | | |
|---|---|---|---|---|
| 60 | FR3 | Covariance violator | L | S, P, D, A |
| 92-93 | CDR3 | Potential Isomerization Site | DS | ES, QS, DA, DN, DQ, |
| | | | | TS, NS, DV |

Heavy chain variable sequence (SEQ ID NO: 123)

| | | | | |
|---|---|---|---|---|
| 27 | FR1 | Covariance violator | H | Y, D, F, N |
| 55-56 | CDR2 | Potential Isomerization Site | DS | ES, QS, DA, DQ, DV, |
| | | | | TS, NS |
| 57-58 | CDR2 | Potential Isomerization Site | DT | ST, ET, DA, DV, QT |
| 105-106 | CDR3 | Potential Isomerization Site | DS | ES, QS, DA, DQ, DV, |
| | | | | TS, NS, GT |

TABLE A6
Engineered Variants of 6E7 Antibody

| | | | | |
|---|---|---|---|---|
| Position in 6E7 | | | | |
| VL Sequence or | | | Parent | Amino Acid |
| VH sequence | Region | Hot Spot | Amino Acid | Substitutions |

Light chain variable sequence (SEQ ID NO: 61)

| | | | | |
|---|---|---|---|---|
| 56-57 | CDR2/FR3 | Potential Deamidation Site | NG | SG, TG, QG, NA, EG, |
| | boundary | | | NV |
| 92-93 | CDR3 | Potential Isomerization Site | DS | ES, QS, DA, DN, DQ, |
| | | | | DV, TS, NS |

Heavy chain variable sequence (SEQ ID NO: 124)

| | | | | |
|---|---|---|---|---|
| 55-56 | CDR2 | Potential Isomerization Site | DS | ES, QS, DA, DQ, DV, |
| | | | | TS, NS |
| 57-58 | CDR2 | Potential Isomerization Site | DT | ST, ET, DA, DV, QT |
| 105-106 | CDR3 | Potential Isomerization Site | DS | ES, QS, DA, DQ, DV, |
| | | | | TS, NS, GT |

TABLE A7
Engineered Variants of 5E3 Antibody

| | | | | |
|---|---|---|---|---|
| Position in 5E3 | | | | |
| VL Sequence or | | | Parent | Amino Acid |
| VH sequence | Region | Hot Spot | Amino Acid | Substitutions |

Light chain variable sequence (SEQ ID NO: 62)

| | | | | |
|---|---|---|---|---|
| 36 | FR2 | Consensus violator | F | Y |
| 46 | FR2 | Covariance violator | S | L, R,V, F |
| 61 | FR3 | Consensus violator | K | R |
| 100 | FR4 | Covariance violator | P | Q, G, R |

Heavy chain variable sequence (SEQ ID NO: 125)

| | | | | |
|---|---|---|---|---|
| 43 | FR2 | Covariance violator | L | Q, K, H |
| 76 | FR3 | Covariance violator | I | T |
| 85 | FR3 | Covariance violator | R | S, G, N, D |
| 99-100 | CDR3 | Potential Isomerization Site | DG | EG, DA, DY, DV, |
| | | | | QG, SG, TG |
| 116 | FR4 | Covariance violator | T | L, M, P, R |

TABLE A8
Engineered Variants of 24G6 Antibody

| | | | | |
|---|---|---|---|---|
| Position in 24G6 | | | | |
| VL Sequence or | | | Parent | Amino Acid |
| VH sequence | Region | Hot Spot | Amino Acid | Substitutions |

Light chain variable sequence (SEQ ID NO: 52)

| | | | | |
|---|---|---|---|---|
| 91 | FR3 | Covariance violator | F | V, I, T, L, D |

Heavy chain variable sequence (SEQ ID NO: 115)

| | | | | |
|---|---|---|---|---|
| 62-63 | CDR2 | Potential Isomerization Site | DS | ES, QS, DA, DQ, TS, |
| | | | | DV, NS |

[0186] In some embodiments, the TREM2 agonist antigen binding proteins comprise one or more CDRs of a variant of the anti-TREM2 antibodies described herein. In some embodiments, the TREM2 agonist antigen binding proteins may comprise one or more CDRs of the anti-TREM2 antibody variants set forth in TABLES A10, A11, A12, A13, and A14, below.

[0187] In certain embodiments, the TREM2 agonist antigen binding proteins of the invention comprise a light chain variable region and/or heavy chain variable region from an affinity-modulated variant of the 6E7 antibody. For instance, in some embodiments, the TREM2 agonist antigen binding proteins comprise a light chain variable region and/or a heavy chain variable region having one or more of the amino acid substitutions set forth in TABLE A9.

TABLE A9
6E7 Antibody Affinity Modulation Variants

| | | | | | | | Binding Signal | | | |
|---|---|---|---|---|---|---|---|---|---|---|
| | | | | | | | (fold over 6E7 | | | |
| | Substitutions with respect | | | | | | Parental antibody) | | | |
| | to 6E7 VH sequence | | | Substitutions with | | | 1^{st} | | | |
| | (SEQ ID NO: 124) | | | respect to 6E7 VL | | | screen | | | |
| | HC | | | (SEQ ID NO: 61) | | | 110 | 2^{nd} | 2^{nd} | 2^{nd} |
| Variant | FR1- | HC | HC | LC | LC | LC | nM or | screen | screen | screen |
| Ab ID | CDR1 | CDR2 | CDR3 | CDR1 | CDR2 | CDR3 | 10 nM^{a} | 2 nM | 10 nM | 100 nM |
| V1 | Y32S | | Q99S | | Q55T | F94Y | 1.68 | 1.29 | 1.92 | |
| V2 | Y27S | S56G | Q99S | | L54R | S93R | 2.55 | 2.23 | 2.90 | |
| V3 | T30A | G66D | Q99G | | L54R | S93R | 1.97 | 1.95 | 2.24 | |
| V4 | T30G | Y60V | Q99S | | S53R | F94Y | 6.00 | 5.88 | 5.51 | |
| V5 | | I50T | | | | F94H | 2.73 | 1.25 | 2.84 | |
| V6 | Y32M | | | | | | 0.20* | | | 0.56 |
| V7 | Y32E | | | | | | 0.11* | | | 0.32 |
| V8 | | R59K | | | | | 0.28* | | | 0.77 |
| V9 | | | T101G | | | | 0.67* | | | 0.54 |
| V10 | | | | | A50S | | 0.76* | | | 0.70 |
| V11 | | | | | | D92A | 0.79* | | | 0.42 |
| V12 | S28E | T58V | Q99G | | N56R | | 2.29 | 1.04 | 2.58 | |
| V13 | T30G | P62A | Q99G | | N56G | F94M | 1.31 | 1.15 | 1.35 | |
| V14 | T30G | S56Q | Q99G | | S53R | | 4.71 | 2.57 | 4.64 | |
| V15 | T30A | I50T | Q99S | | S53W | F94Y | 5.23 | 4.72 | 4.78 | |
| V16 | F29M | S56G | Q99S | | S53N | | 4.01 | 3.57 | 4.04 | |
| V17 | T30G | | Q99S | | L54R | F94S | 5.37 | 4.22 | 5.51 | |
| V18 | W33H | | | | | | 0.17* | | | 0.42 |
| V19 | Y32S | | | | | | 0.59* | | | 0.48 |
| V20 | | I50R | | | | | 0.18* | | | 0.52 |
| V21 | | | Y109F | | | | 0.76* | | | 0.68 |
| V22 | | | | | A50R | | 0.30* | | | 0.71 |
| V23 | | | | | | R96L | 0.40* | | | 0.40 |
| V24 | | T58V | Q99S | | N56K | R96H | 2.64 | 1.42 | 2.90 | |
| V25 | T30G | I50L | Q99S | | Q55A | F94M | 4.23 | 3.15 | 4.70 | |
| V26 | A35G | I50T | F102M, | | N56R | F94Y | 3.57 | 2.83 | 3.47 | |
| | | | Y112A | | | | | | | |
| V27 | | S61A | Q99S | | N56R | | 5.50 | 5.67 | 5.69 | |
| V28 | T30Q | I50T | Y103F | | N56S | F94L | 3.08 | 2.63 | 3.61 | |
| V29 | T30K | | | | | | 1.53 | 0.84 | 1.67 | |
| V30 | Y27S | | | | | | 0.79* | | | 0.72 |
| V31 | | D57E | | | | | 0.61* | | 0.73 | |
| V32 | | P62N | | | | | 0.82* | | | 0.89 |
| V33 | | | Y104G | | | | 0.23* | | | 0.34 |
| V34 | | | | | N56D | | 0.34* | | | 1.02 |
| V35 | | | | | | D92Y | 0.21* | | | 0.29 |
| V36 | I34L | | Q99S | | L54R | F94Y | 3.38 | 4.00 | 3.44 | |
| V37 | F29H | Q65A | Q99S | | N56W | F94Y | 3.46 | 3.69 | 3.49 | |
| V38 | T30G | T58V | | | L54R | F94H | 4.34 | 3.44 | 4.36 | |
| V39 | T30G | S61N | Q99G | | Q55V | F94S | 6.15 | 5.11 | 5.81 | |
| V40 | T30G | T58V | F110S | | N56L | S93R | 4.48 | 3.41 | 4.16 | |
| V41 | | I50T | | | | | 1.74 | 0.58 | 1.72 | |
| V42 | Y32A | | | | | | 0.45* | | | 0.41 |
| V43 | | D57G | | | | | 0.20* | | | 0.33 |
| V44 | | G54S | | | | | 0.65* | | | 0.52 |
| V45 | | | | W32F | | | 0.43* | | | 0.53 |
| V46 | | | | | S53T | | 0.83* | | | 0.96 |
| V47 | | | | | | R96M | 0.42* | | | 0.47 |
| V48 | T30G | T58V | Q99M | | N56T | F94L | 2.42 | 2.30 | 2.54 | |
| V49 | T30N | I50T, | Q99S | | L54R | F94Y | 6.51 | 5.02 | 6.58 | |
| | | Y60L | | | | | | | | |
| V50 | T30G | I50V | F110L | | L54R | F94L | 4.10 | 3.39 | 4.16 | |
| V51 | | T58V | Q99G, | | L54R | | 2.81 | 1.83 | 3.18 | |
| | | | Y112N | | | | | | | |
| V52 | T30E | | Q99G | | N56R | S93R | 3.00 | 1.78 | 3.09 | |
| V53 | | S63H | | | | | 1.25 | 0.66 | 1.17 | |
| V54 | Y32Q | | | | | | 0.55* | | | 0.54 |
| V55 | | R59I, | | | | | 0.24* | | | 0.66 |
| | | F64H | | | | | | | | |
| V56 | | S61Q | | | | | 0.23* | | | 0.59 |
| V57 | | | | R24A | | | 0.84* | | | 0.85 |
| V58 | | | | | A50K | | 0.28* | | | 0.68 |
| V59 | | | | | | Q89M | 0.19* | | | 0.60 |
| V60 | S28H | T58V | F110S | | N56R | Q89G | 3.26 | 3.35 | 3.63 | |
| V61 | T30S | S61N | Q99G | | Q55V | F94L | 5.08 | 3.63 | 5.22 | |
| V62 | T30G | S61A | D108G | | N56R | Q89G | 2.49 | 1.87 | 2.89 | |
| V63 | T30R | | Q99S | | N56R | S93R | 3.76 | 4.91 | 3.71 | |
| V64 | T30Q | | Q99G | | Q55A | F94Y | 5.41 | 4.88 | 5.48 | |
| V65 | | | Q99S | | | | 2.05 | 1.29 | 2.75 | |
| V66 | Y27T | | | | | | 0.25* | | | 0.74 |
| V67 | | I50M | | | | | 0.80* | | | 0.84 |
| V68 | | | Y103R | | | | 0.44* | | | 0.43 |
| V69 | | | | W32Y | | | 0.41* | | | 0.40 |
| V70 | | | | | S52G | | 0.79* | | | 0.84 |
| V71 | | | | | | F94E | 0.37* | | | 0.48 |
| V72 | A35G | | Q99G | | Q55V | F94Y | 3.64 | 2.50 | 4.01 | |
| V73 | T30G | S63G | Q99G | | L54R | F94Y | 5.12 | 4.17 | 5.44 | |
| V74 | T30A | T58V | Q99G | | N56L | | 3.94 | 2.54 | 4.01 | |
| V75 | | | Q99G | | N56A | F94Y | 4.64 | 3.74 | 4.52 | |
| V76 | T30G | S63E | F110S | | N56K | | 4.57 | 4.34 | 4.93 | |
| V77 | | | | | L54R | | 1.43 | 0.83 | 1.38 | |
| V78 | S28R | | | | | | 0.86* | | | 1.11 |
| V79 | | R59N | | | | | 0.70* | | | 0.52 |
| V80 | | | T101N | | | | 0.59* | | | 0.50 |
| V81 | | | | W32L | | | 0.17* | | | 0.23 |
| V82 | | | | | A51G | | 0.30* | | | 0.79 |
| V83 | | | | | | D92V | 0.20* | | | 0.29 |
| V84 | S28G | | F110S | | A50G | | 1.44 | 1.45 | 1.62 | |
| V85 | T30R | I50T | Q99S | | L54R | | 5.41 | 5.41 | 5.37 | |
| V86 | T30G, | Q65E | Q99S | | L54R | | 4.80 | 5.17 | 5.02 | |
| | I34L | | | | | | | | | |
| V87 | T30R | T58V, | Q99S | | N56W | | 3.84 | 4.86 | 3.93 | |
| | | S63D | | | | | | | | |
| V88 | T30G | | | | S53R, | F94S | 4.92 | 5.57 | 5.30 | |
| | | | | | N56R | | | | | |
| V89 | | | | | | F94H | 1.33 | 0.94 | 1.46 | |
| V90 | Y32E | | | S31R | | | 0.33* | | | 0.36 |
| V91 | | G54D | | | | | 0.25* | | | 0.61 |
| V92 | | | Y103H | | | | 0.22* | | | 0.65 |
| V93 | | | | S31G | | | 0.35* | | | 1.05 |
| V94 | | | | | S52A | | 0.31* | | | 0.87 |

[0188] In some embodiments, the TREM2 agonist antigen binding protein comprises a light chain variable region comprising the sequence of SEQ ID NO: 61 with a mutation at one or more amino acid positions 24, 31, 50, 52, 54, 56, 89, 92, 93, 94 and/or 96. In certain embodiments, the mutation is selected from R24A, S31R, A50S, A50G, S52G, L54R, N56K, N56R, N56L, N56T, Q89G, D92V, S93R, F94Y, F94L, R96H, R96L, or combinations thereof. In these and other embodiments, the TREM2 agonist antigen binding protein comprises a heavy chain variable region comprising the sequence of SEQ ID NO: 124 with a mutation at one or more amino acid positions 27, 28, 30, 32, 50, 54, 58, 60, 61, 63, 66, 99, 101, 103, 104, and/or 110. In some embodiments, the mutation is selected from Y27S, S28G, S28H, T30N, T30G, T30E, T30A, Y32E, I50T, G54S, T58V, Y60L, S61A, S63G, S63E, G66D, Q99G, Q99S, Q99M, T101G, Y103R, Y104G, F110S, or combinations thereof. Amino acid sequences for light chain and heavy chain variable regions and associated CDRs of exemplary variants of the 6E7 antibody with improved affinity are set forth below in TABLES A7 and A8, respectively. Amino acid sequences for light chain and heavy chain variable regions and associated CDRs of exemplary variants of the 6E7 antibody with reduced affinity are set forth below in TABLES A10 and A11, respectively. The corresponding sequences for the 6E7 antibody are listed for comparison.

TABLE A10
Light Chain Variable Region Amino Acid Sequences for Improved Affinity TREM2 Antibodies

| Variant | VL | | | | |
|---|---|---|---|---|---|
| Ab ID. | Group | VL Amino Acid Sequence | CDRL1 | CDRL2 | CDRL3 |
| 6E7 | LV-16 | DIQMTQSPSSVSASVGDRVTITCRASQGIS | RASQGI | AASSLQ | QQADS |
| | | SWLAWYQQKPGKAPKLLIYAASSLQNGV | SSWLA | N | FPRT |
| | | PSRFSGSGSGTDFTLTISSLQPEDFATYFC | (SEQ ID | (SEQ ID | (SEQ ID |
| | | QQADSFPRTFGQGTKLEIK | NO: 16) | NO: 28) | NO: 43) |
| | | (SEQ ID NO: 61) | | | |
| V3 | LV-101 | DIQMTQSPSSVSASVGDRVTITCRASQGIS | RASQGI | AASSRQ | QQADR |
| | | SWLAWYQQKPGKAPKLLIYAASSRQNGV | SSWLA | N | FPRT |
| | | PSRFSGSGSGTDFTLTISSLQPEDFATYFC | (SEQ ID | (SEQ ID | (SEQ ID |
| | | QQADRFPRTFGQGTKLEIK | NO: 16) | NO: 143) | NO: 148) |
| | | (SEQ ID NO: 153) | | | |
| V24 | LV-102 | DIQMTQSPSSVSASVGDRVTITCRASQGIS | RASQGI | AASSLQ | QQADS |
| | | SWLAWYQQKPGKAPKLLIYAASSLQKGV | SSWLA | K | FPHT |
| | | PSRFSGSGSGTDFTLTISSLQPEDFATYFC | (SEQ ID | (SEQ ID | (SEQ ID |
| | | QQADSFPHTFGQGTKLEIK | NO: 16) | NO: 144) | NO: 149) |
| | | (SEQ ID NO: 154) | | | |
| V27 | LV-103 | DIQMTQSPSSVSASVGDRVTITCRASQGIS | RASQGI | AASSLQ | QQADS |
| | | SWLAWYQQKPGKAPKLLIYAASSLQRGV | SSWLA | R | FPRT |
| | | PSRFSGSGSGTDFTLTISSLQPEDFATYFC | (SEQ ID | (SEQ ID | (SEQ ID |
| | | QQADSFPRTFGQGTKLEIK | NO: 16) | NO: 145) | NO: 43) |
| | | (SEQ ID NO: 155) | | | |
| V40 | LV-104 | DIQMTQSPSSVSASVGDRVTITCRASQGIS | RASQGI | AASSLQ | QQADR |
| | | SWLAWYQQKPGKAPKLLIYAASSLQLGV | SSWLA | L | FPRT |
| | | PSRFSGSGSGTDFTLTISSLQPEDFATYFC | (SEQ ID | (SEQ ID | (SEQ ID |
| | | QQADRFPRTFGQGTKLEIK | NO: 16) | NO: 146) | NO: 148) |
| | | (SEQ ID NO: 156) | | | |
| V48 | LV-105 | DIQMTQSPSSVSASVGDRVTITCRASQGIS | RASQGI | AASSLQ | QQADS |
| | | SWLAWYQQKPGKAPKLLIYAASSLQTGV | SSWLA | T | LPRT |
| | | PSRFSGSGSGTDFTLTISSLQPEDFATYFC | (SEQ ID | (SEQ ID | (SEQ ID |
| | | QQADSLPRTFGQGTKLEIK | NO: 16) | NO: 26) | NO: 150) |
| | | (SEQ ID NO: 157) | | | |
| V49 | LV-106 | DIQMTQSPSSVSASVGDRVTITCRASQGIS | RASQGI | AASSRQ | QQADS |
| V73 | | SWLAWYQQKPGKAPKLLIYAASSRQNGV | SSWLA | N | YPRT |
| | | PSRFSGSGSGTDFTLTISSLQPEDFATYFC | (SEQ ID | (SEQ ID | (SEQ ID |
| | | QQADSYPRTFGQGTKLEIK | NO: 16) | NO: 143) | NO: 151) |
| | | (SEQ ID NO: 158) | | | |
| V52 | LV-107 | DIQMTQSPSSVSASVGDRVTITCRASQGIS | RASQGI | AASSLQ | QQADR |
| | | SWLAWYQQKPGKAPKLLIYAASSLQRGV | SSWLA | R | FPRT |
| | | PSRFSGSGSGTDFTLTISSLQPEDFATYFC | (SEQ ID | (SEQ ID | (SEQ ID |
| | | QQADRFPRTFGQGTKLEIK | NO: 16) | NO: 145) | NO: 148) |
| | | (SEQ ID NO: 159) | | | |
| V60 | LV-108 | DIQMTQSPSSVSASVGDRVTITCRASQGIS | RASQGI | AASSLQ | GQADS |
| | | SWLAWYQQKPGKAPKLLIYAASSLQRGV | SSWLA | R | FPRT |
| | | PSRFSGSGSGTDFTLTISSLQPEDFATYFC | (SEQ ID | (SEQ ID | (SEQ ID |
| | | GQADSFPRTFGQGTKLEIK | NO: 16) | NO: 145) | NO: 152) |
| | | (SEQ ID NO: 160) | | | |
| V76 | LV-109 | DIQMTQSPSSVSASVGDRVTITCRASQGIS | RASQGI | AASSLQ | QQADS |
| | | SWLAWYQQKPGKAPKLLIYAASSLQKGV | SSWLA | K | FPRT |
| | | PSRFSGSGSGRDFTLTISSLQPEDFATYFC | (SEQ ID | (SEQ ID | (SEQ ID |
| | | QQADSFPRTFGQGTKLEIK | NO: 16) | NO: 144) | NO: 43) |
| | | (SEQ ID NO: 161) | | | |
| V84 | LV-110 | DIQMTQSPSSVSASVGDRVTITCRASQGIS | RASQGI | GAS SLQ | QQADS |
| | | SWLAWYQQKPGKAPKLLIYGASSLQNGV | SSWLA | N | FPRT |
| | | PSRFSGSGSGTDFTLTISSLQPEDFATYFC | (SEQ ID | (SEQ ID | (SEQ ID |
| | | QQADSFPRTFGQGTKLEIK | NO: 16) | NO: 147) | NO: 43) |
| | | (SEQ ID NO: 162) | | | |

TABLE A11
Heavy Chain Variable Region Amino Acid Sequences for Improved Affinity TREM2 Antibodies

| | | | FR1/ | | | |
|---|---|---|---|---|---|---|
| Variant | VH | | CDRH1 | | | |
| Ab ID. | Group | VH Amino Acid Sequence | Border | CDRH1 | CDRH2 | CDRH3 |
| 6E7 | HV-15 | EVQLVQSGAEVKKPGESLKIS | YSFT | SYWIA | IIYPGDS | QRTFYY |
| | | CKGSGYSFTSYWIAWVRQMP | (SEQ ID | (SEQ ID | DTRYSP | DSSDYF |
| | | GKGLEWMGITYPGDSDTRYSP | NO: 163) | NO: 85) | SFQG | DY |
| | | SFQGQVTISADKSISTAYLQWS | | | (SEQ ID | (SEQ ID |
| | | SLKASDTAMYFCARQRTFYY | | | NO: 91) | NO: 107) |
| | | DSSDYFDYWGQGTLVTVSS | | | | |
| | | (SEQ ID NO: 124) | | | | |
| V3 | HV-101 | EVQLVQSGAEVKKPGESLKIS | YSFA | SYWIA | IIYPGDS | GRTFYY |
| | | CKGSGYSFASYWIAWVRQMP | (SEQ ID | (SEQ ID | DTRYSP | DSSDYF |
| | | GKGLEWMGITYPGDSDTRYSP | NO: 164) | NO: 85) | SFQD | DY |
| | | SFQDQVTISADKSISTAYLQWS | | | (SEQ ID | (SEQ ID |
| | | SLKASDTAMYFCARGRTFYY | | | NO: 170) | NO: 176) |
| | | DSSDYFDYWGQGTLVTVSS | | | | |
| | | (SEQ ID NO: 180) | | | | |
| V24 | HV-102 | EVQLVQSGAEVKKPGESLKIS | YSFT | SYWIA | IIYPGDS | SRTFYY |
| | | CKGSGYSFTSYWIAWVRQMP | (SEQ ID | (SEQ ID | DVRYSP | DSSDYF |
| | | GKGLEWMGIIYPGDSDVRYSP | NO: 163) | NO: 85) | SFQG | DY |
| | | SFQGQVTISADKSISTAYLQWS | | | (SEQ ID | (SEQ ID |
| | | SLKASDTAMYFCARSRTFYYD | | | NO: 171) | NO: 177) |
| | | SSDYFDYWGQGTLVTVSS | | | | |
| | | (SEQ ID NO: 181) | | | | |
| V27 | HV-103 | EVQLVQSGAEVKKPGESLKIS | YSFT | SYWIA | IIYPGDS | SRTFYY |
| | | CKGSGYSFTSYWIAWVRQMP | (SEQ ID | (SEQ ID | DTRYAP | DSSDYF |
| | | GKGLEWMGIIYPGDSDTRYAP | NO: 163) | NO: 85) | SFQG | DY |
| | | SFQGQVTISADKSISTAYLQWS | | | (SEQ ID | (SEQ ID |
| | | SLKASDTAMYFCVRSRTFYYD | | | NO: 172) | NO: 177) |
| | | SSDYFDYWGQGTLVTVSS | | | | |
| | | (SEQ ID NO: 182) | | | | |
| V40 | HV-104 | EVQLVQSGAEVKKPGESLKIS | YSFG | SYWIA | IIYPGDS | QRTFYY |
| | | CKGSGYSFGSYWIAWVRQMP | (SEQ ID | (SEQ ID | DVRYSP | DSSDYS |
| | | GKGLEWMGIIYPGDSDVRYSP | NO: 165) | NO: 85) | SFQG | DY |
| | | SFQGQVTISADKSISTAYLQWS | | | (SEQ ID | (SEQ ID |
| | | SLKASDTAMYFCARQRTFYY | | | NO: 171) | NO: 178) |
| | | DSSDYSDYWGQGTLVTVSS | | | | |
| | | (SEQ ID NO: 183) | | | | |
| V48 | HV-105 | EVQLVQSGAEVKKPGESLKIS | YSFG | SYWIA | IIYPGDS | MRTFYY |
| | | CKGSGYSFGSYWIAWVRQMP | (SEQ ID | (SEQ ID | DVRYSP | DSSDYF |
| | | GKGLEWMGIIYPGDSDVRYSP | NO: 165) | NO: 85) | SFQG | DY |
| | | SFQGQVTISADKSISTAYLQWS | | | (SEQ ID | (SEQ ID |
| | | SLKASDTAMYFCARMRTFYY | | | NO: 171) | NO: 179) |
| | | DSSDYFDYWGQGTLVTVSS | | | | |
| | | (SEQ ID NO: 184) | | | | |
| V49 | HV-106 | EVQLVQSGAEVKKPGESLKIS | YSFN | SYWIA | TIYPGDS | SRTFYY |
| | | CKGSGYSFNSYWIAWVRQMP | (SEQ ID | (SEQ ID | DTRLSPS | DSSDYF |
| | | GKGLEWMGTIYPGDSDTRLSP | NO: 166) | NO: 85) | FQG | DY |
| | | SFQGQVTISADKSISTAYLQWS | | | (SEQ ID | (SEQ ID |
| | | SLKASDTAMYFCARSRTFYYD | | | NO: 173) | NO: 177) |
| | | SSDYFDYWGQGTLVTVSS | | | | |
| | | (SEQ ID NO: 185) | | | | |
| V52 | HV-107 | EVQLVQSGAEVKKPGESLKIS | YSFE | SYWIA | IIYPGDS | GRTFYY |
| | | CKGSGYSFESYWIAWVRQMP | (SEQ ID | (SEQ ID | DTRYSP | DSSDYF |
| | | GKGLEWMGIIYPGDSDTRYSP | NO: 167) | NO: 85) | SFQG | DY |
| | | SFQGQVTISADKSISTAYLQWS | | | (SEQ ID | (SEQ ID |
| | | SLKASDTAMYFCARGRTFYY | | | NO: 91) | NO: 176) |
| | | DSSDYFDYWGQGTLVTVSS | | | | |
| | | (SEQ ID NO: 186) | | | | |
| V60 | HV-108 | EVQLVQSGAEVKKPGESLKIS | YFIFT | SYWIA | IIYPGDS | QRTFYY |
| | | CKGSGYHFTSYWIAWVRQMP | (SEQ ID | (SEQ ID | DVRYSP | DSSDYS |
| | | GKGLEWMGIIYPGDSDVRYSP | NO: 168) | NO: 85) | SFQG | DY |
| | | SFQGQVTISADKSISTAYLQWS | | | (SEQ ID | (SEQ ID |
| | | SLKASDTAMYFCARQRTFYY | | | NO: 171) | NO: 178) |
| | | DSSDYSDYWGQGTLVTVSS | | | | |
| | | (SEQ ID NO: 187) | | | | |
| V73 | HV-109 | EVQLVQSGAEVKKPGESLKIS | YSFG | SYWIA | IIYPGDS | GRTFYY |
| | | CKGSGYSFGSYWIAWVRQMP | (SEQ ID | (SEQ ID | DTRYSP | DSSDYF |
| | | GKGLEWMGIIYPGDSDTRYSP | NO: 165) | NO: 85) | GFQG | DY |
| | | GFQGQVTISADKSISTAYLQW | | | (SEQ ID | (SEQ ID |
| | | SSLKASDTAMYFCARGRTFYY | | | NO: 174) | NO: 176) |
| | | DSSDYFDYWGQGTLVTVSS | | | | |
| | | (SEQ ID NO: 188) | | | | |
| V76 | HV-110 | EVQLVQSGAEVKKPGESLKIS | YSFG | SYWIA | IIYPGDS | QRTFYY |
| | | CKGSGYSFGSYWIAWVRQMP | (SEQ ID | (SEQ ID | DTRYSP | DSSDYS |
| | | GKGLEWMGITYPGDSDTRYSP | NO: 165) | NO: 85) | EFQG | DY |
| | | EFQGQVTISADKSISTAYLQWS | | | (SEQ ID | (SEQ ID |
| | | SLKASDTAMYFCARQRTFYY | | | NO: 175) | NO: 178) |
| | | DSSDYSDYWGQGTLVTVSS | | | | |
| | | (SEQ ID NO: 189) | | | | |
| V84 | HV-111 | EVQLVQSGAEVKKPGESLKIS | YGFT | SYWIA | IIYPGDS | QRTFYY |
| | | CKGSGYGFTSYWIAWVRQMP | (SEQ ID | (SEQ ID | DTRYSP | DSSDYS |
| | | GKGLEWMGITYPGDSDTRYSP | NO: 169) | NO: 85) | SFQG | DY |
| | | SFQGQVTISADKSISTAYLQWS | | | (SEQ ID | (SEQ ID |
| | | SLKASDTAMYFCARQRTFYY | | | NO: 91) | NO: 178) |
| | | DSSDYSDYWGQGTLVTVSS | | | | |
| | | (SEQ ID NO: 190) | | | | |

[0189] In some embodiments, the TREM2 agonist antigen binding proteins of the invention may comprise one or more of the CDRs from the improved affinity variants presented in TABLE A10 (light chain CDRs; i.e. CDRLs) and TABLE A11 (heavy chain CDRs, i.e. CDRHs). In some embodiments, the TREM2 agonist antigen binding proteins comprise a consensus CDR sequence derived from the improved affinity variants. For instance, in some embodiments, the TREM2 agonist antigen binding proteins comprise a CDRL2 consensus sequence of X₁ASSX₂QX₃ (SEQ ID NO: 139), where X₁ is A or G; X₂ is L or R; and X₃ is N, K, R, L, or T. In another embodiment, the TREM2 agonist antigen binding proteins comprise a CDRL3 consensus sequence of X₁QADX_{Z}X₃PX₄T (SEQ ID NO: 140), where X₁ is Q or G; X₂ is S or R; X₃ is F, L, or Y; and X₄ is R or H. In yet another embodiment, the TREM2 agonist antigen binding proteins comprise a CDRH2 consensus sequence of X₁IYPGDSDX_{Z}RX₃X₄PX₅FQX₆ (SEQ ID NO: 141), where X₁ is I or T; X₂ is T or V; X₃ is Y or L; X₄ is S or A; X₅ is S, G, or E; and X₆ is G or D. In some embodiments, the TREM2 agonist antigen binding proteins comprise a CDRH3 consensus sequence of X₁RTFYYDSSDYXzDY (SEQ ID NO: 142), where X₁ is Q, G, S, or M; and X₂ is F or S.

[0190] In some embodiments, the TREM2 agonist antigen binding proteins comprise a light chain variable region comprising complementarity determining regions CDRL1, CDRL2, and CDRL3 and a heavy chain variable region comprising complementarity determining regions CDRH1, CDRH2, and CDRH3, wherein CDRL1 comprises the sequence of SEQ ID NO: 16, CDRL2 comprises the consensus sequence of SEQ ID NO: 139, CDRL3 comprises the consensus sequence of SEQ ID NO: 140, CDRH1 comprises the sequence of SEQ ID NO:85, CDRH2 comprises the consensus sequence of SEQ ID NO:141, and CDRH3 comprises the consensus sequence of SEQ ID NO: 142.

[0191] In some embodiments, the TREM2 agonist antigen binding protein comprises a CDRL1 comprising the sequence of SEQ ID NO: 16; a CDRL2 comprising a sequence selected from SEQ ID NOS:26 and 143-147; a CDRL3 comprising a sequence selected from SEQ ID NOS:43 and 148-152; a CDRH1 comprising the sequence of SEQ ID NO:85; a CDRH2 comprising a sequence selected from SEQ ID NOS:91 and 170-175; and a CDRH3 comprising a sequence selected from SEQ ID NOS:176-179.

[0192] In particular embodiments, the TREM2 agonist antigen binding proteins of the invention comprise a light chain variable region comprising a CDRL1, a CDRL2, and a CDRL3, wherein:
[0193] (a) CDRL1, CDRL2, and CDRL3 have the sequence of SEQ ID NOS: 16, 143, and 148, respectively;
[0194] (b) CDRL1, CDRL2, and CDRL3 have the sequence of SEQ ID NOS:16, 144, and 149, respectively;
[0195] (c) CDRL1, CDRL2, and CDRL3 have the sequence of SEQ ID NOS: 16, 145, and 43, respectively;
[0196] (d) CDRL1, CDRL2, and CDRL3 have the sequence of SEQ ID NOS:16, 146, and 148, respectively;
[0197] (e) CDRL1, CDRL2, and CDRL3 have the sequence of SEQ ID NOS: 16, 26, and 150, respectively;
[0198] (f) CDRL1, CDRL2, and CDRL3 have the sequence of SEQ ID NOS:16, 143, and 151, respectively;
[0199] (g) CDRL1, CDRL2, and CDRL3 have the sequence of SEQ ID NOS:16, 145, and 148, respectively;
[0200] (h) CDRL1, CDRL2, and CDRL3 have the sequence of SEQ ID NOS:16, 145, and 152, respectively;
[0201] (i) CDRL1, CDRL2, and CDRL3 have the sequence of SEQ ID NOS:16, 144, and 43, respectively; or
[0202] (j) CDRL1, CDRL2, and CDRL3 have the sequence of SEQ ID NOS:16, 147, and 43, respectively.

[0203] In related embodiments, the TREM2 agonist antigen binding proteins of the invention comprise a heavy chain variable region comprising a CDRH1, a CDRH2, and a CDRH3, wherein: (a) CDRH1, CDRH2, and CDRH3 have the sequence of SEQ ID NOS:85, 170, and 176, respectively;
[0204] (b) CDRH1, CDRH2, and CDRH3 have the sequence of SEQ ID NOS:85, 171, and 177, respectively;
[0205] (c) CDRH1, CDRH2, and CDRH3 have the sequence of SEQ ID NOS:85, 172, and 177, respectively;
[0206] (d) CDRH1, CDRH2, and CDRH3 have the sequence of SEQ ID NOS:85, 171, and 178, respectively;
[0207] (e) CDRH1, CDRH2, and CDRH3 have the sequence of SEQ ID NOS:85, 171, and 179, respectively;
[0208] (f) CDRH1, CDRH2, and CDRH3 have the sequence of SEQ ID NOS:85, 173, and 177, respectively;
[0209] (g) CDRH1, CDRH2, and CDRH3 have the sequence of SEQ ID NOS:85, 91, and 176, respectively;
[0210] (h) CDRH1, CDRH2, and CDRH3 have the sequence of SEQ ID NOS:85, 174, and 176, respectively;
[0211] (i) CDRH1, CDRH2, and CDRH3 have the sequence of SEQ ID NOS:85, 175, and 178, respectively; or
[0212] (j) CDRH1, CDRH2, and CDRH3 have the sequence of SEQ ID NOS:85, 91, and 178, respectively.

[0213] In some embodiments, the TREM2 agonist antigen binding proteins of the invention comprise a light chain variable region comprising a CDRL1, a CDRL2, and a CDRL3 and a heavy chain variable region comprising a CDRH1, a CDRH2, and a CDRH3, wherein:
[0214] (a) CDRL1, CDRL2, and CDRL3 have the sequence of SEQ ID NOS: 16, 143, and 148, respectively, and CDRH1, CDRH2, and CDRH3 have the sequence of SEQ ID NOS:85, 170, and 176, respectively;
[0215] (b) CDRL1, CDRL2, and CDRL3 have the sequence of SEQ ID NOS:16, 144, and 149, respectively, and CDRH1, CDRH2, and CDRH3 have the sequence of SEQ ID NOS:85, 171, and 177, respectively;
[0216] (c) CDRL1, CDRL2, and CDRL3 have the sequence of SEQ ID NOS: 16, 145, and 43, respectively, and CDRH1, CDRH2, and CDRH3 have the sequence of SEQ ID NOS:85, 172, and 177, respectively;
[0217] (d) CDRL1, CDRL2, and CDRL3 have the sequence of SEQ ID NOS:16, 146, and 148, respectively, and CDRH1, CDRH2, and CDRH3 have the sequence of SEQ ID NOS:85, 171, and 178, respectively;
[0218] (e) CDRL1, CDRL2, and CDRL3 have the sequence of SEQ ID NOS: 16, 26, and 150, respectively, and CDRH1, CDRH2, and CDRH3 have the sequence of SEQ ID NOS:85, 171, and 179, respectively;
[0219] (f) CDRL1, CDRL2, and CDRL3 have the sequence of SEQ ID NOS:16, 143, and 151, respectively, and CDRH1, CDRH2, and CDRH3 have the sequence of SEQ ID NOS:85, 173, and 177, respectively;
[0220] (g) CDRL1, CDRL2, and CDRL3 have the sequence of SEQ ID NOS:16, 145, and 148, respectively, and CDRH1, CDRH2, and CDRH3 have the sequence of SEQ ID NOS:85, 91, and 176, respectively;
[0221] (h) CDRL1, CDRL2, and CDRL3 have the sequence of SEQ ID NOS:16, 145, and 152, respectively, and CDRH1, CDRH2, and CDRH3 have the sequence of SEQ ID NOS:85, 171, and 178, respectively;
[0222] (i) CDRL1, CDRL2, and CDRL3 have the sequence of SEQ ID NOS:16, 143, and 151, respectively, and CDRH1, CDRH2, and CDRH3 have the sequence of SEQ ID NOS:85, 174, and 176, respectively;
[0223] (j) CDRL1, CDRL2, and CDRL3 have the sequence of SEQ ID NOS:16, 144, and 43, respectively, and CDRH1, CDRH2, and CDRH3 have the sequence of SEQ ID NOS:85, 175, and 178, respectively; or
[0224] (k) CDRL1, CDRL2, and CDRL3 have the sequence of SEQ ID NOS:16, 147, and 43, respectively, and CDRH1, CDRH2, and CDRH3 have the sequence of SEQ ID NOS:85, 91, and 178, respectively.

[0225] In some embodiments, the TREM2 agonist antigen binding proteins of the invention may comprise a light chain variable region selected from LV-101, LV-102, LV-103, LV-104, LV-105, LV-106, LV-107, LV-108, LV-109, and LV-110, as shown in TABLE A10, and/or a heavy chain variable region selected from HV-101, HV-102, HV-103, HV-104, HV-105, HV-106, HV-107, HV-108, HV-109, HV-110, and HV-111, as shown in TABLE A11, or sequences that are at least 80% identical, at least 85% identical, at least 90% identical, or at least 95% identical to any of the sequences in TABLE A10 and A11. For instance, in some embodiments, the TREM2 agonist antigen binding proteins comprise a light chain variable region comprising (i) a sequence that is at least 90% identical to a sequence selected from SEQ ID NOS: 153-162, (ii) a sequence that is at least 95% identical to a sequence selected from SEQ ID NOS: 153-162, or (iii) a sequence selected from SEQ ID NOS:153-162. In related embodiments, the TREM2 agonist antigen binding proteins comprise a heavy chain variable region comprising (i) a sequence that is at least 90% identical to a sequence selected from SEQ ID NOS: 180-190, (ii) a sequence that is at least 95% identical to a sequence selected from SEQ ID NOS: 180-190, or (iii) a sequence selected from SEQ ID NOS:180-190.

[0226] Each of the light chain variable regions listed in TABLE A10 may be combined with any of the heavy chain variable regions listed in TABLE A11 to form an anti-TREM2 binding domain of the antigen binding proteins of the invention. Examples of such combinations include, but are not limited to: LV-101 (SEQ ID NO:153) and HV-101 (SEQ ID NO:180); LV-102 (SEQ ID NO:154) and HV-102 (SEQ ID NO:181); LV-103 (SEQ ID NO: 155) and HV-103 (SEQ ID NO:182); LV-104 (SEQ ID NO: 156) and HV-104 (SEQ ID NO: 183); LV-105 (SEQ ID NO:157) and HV-105 (SEQ ID NO: 184); LV-106 (SEQ ID NO: 158) and HV-106 (SEQ ID NO:185); LV-107 (SEQ ID NO: 159) and HV-107 (SEQ ID NO: 186); LV-108 (SEQ ID NO:160) and HV-108 (SEQ ID NO: 187); LV-106 (SEQ ID NO: 158) and HV-109 (SEQ ID NO:188); LV-109 (SEQ ID NO: 161) and HV-110 (SEQ ID NO: 189); and LV-110 (SEQ ID NO: 162) and HV-111 (SEQ ID NO: 190).

TABLE A12
Light Chain Variable Region Amino Acid Sequences for Reduced Affinity TREM2 Antibodies

| Variant | VL | | | | |
|---|---|---|---|---|---|
| Ab ID. | Group | VL Amino Acid Sequence | CDRL1 | CDRL2 | CDRL3 |
| 6E7 | LV-16 | DIQMTQSPSSVSASVGDRVTITCRASQGI | RASQGI | AASSLQ | QQADS |
| | | SSWLAWYQQKPGKAPKLLIYAASSLQN | SSWLA | N | FPRT |
| | | GVPSRFSGSGSGTDFTLTISSLQPEDFATY | (SEQ ID | (SEQ ID | (SEQ ID |
| | | FCQQADSFPRTFGQGTKLEIK | NO: 16) | NO: 28) | NO: 43) |
| | | (SEQ ID NO: 61) | | | |
| V9 | LV-16 | DIQMTQSPSSVSASVGDRVTITCRASQGI | RASQGI | AASSLQ | QQADS |
| V30 | | SSWLAWYQQKPGKAPKLLIYAASSLQN | SSWLA | N | FPRT |
| V33 | | GVPSRFSGSGSGTDFTLTISSLQPEDFATY | (SEQ ID | (SEQ ID | (SEQ ID |
| V44 | | FCQQADSFPRTFGQGTKLEIK | NO: 16) | NO: 28) | NO: 43) |
| V68 | | (SEQ ID NO: 61) | | | |
| V10 | LV-201 | DIQMTQSPSSVSASVGDRVTITCRASQGI | RASQGI | SASSLQ | QQADS |
| | | SSWLAWYQQKPGKAPKLLIYSASSLQN | SSWLA | N | FPRT |
| | | GVPSRFSGSGSGTDFTLTISSLQPEDFATY | (SEQ ID | (SEQ ID | (SEQ ID |
| | | FCQQADSFPRTFGQGTKLEIK | NO: 16) | NO: 292) | NO: 43) |
| | | (SEQ ID NO: 295) | | | |
| V23 | LV-202 | DIQMTQSPSSVSASVGDRVTITCRASQGI | RASQGI | AASSLQ | QQADS |
| | | SSWLAWYQQKPGKAPKLLIYAASSLQN | SSWLA | N | FPLT |
| | | GVPSRFSGSGSGTDFTLTISSLQPEDFATY | (SEQ ID | (SEQ ID | (SEQ ID |
| | | FCQQADSFPLTFGQGTKLEIK | NO: 16) | NO: 28) | NO: 294) |
| | | (SEQ ID NO: 296) | | | |
| V57 | LV-203 | DIQMTQSPSSVSASVGDRVTITCAASQGI | AASQGI | AASSLQ | QQADS |
| | | SSWLAWYQQKPGKAPKLLIYAASSLQN | SSWLA | N | FPRT |
| | | GVPSRFSGSGSGTDFTLTISSLQPEDFATY | (SEQ ID | (SEQ ID | (SEQ ID |
| | | FCQQADSFPRTFGQGTKLEIK | NO: 290) | NO: 28) | NO: 43) |
| | | (SEQ ID NO: 297) | | | |
| V70 | LV-204 | DIQMTQSPSSVSASVGDRVTITCRASQGI | RASQGI | AAGSL | QQADS |
| | | SSWLAWYQQKPGKAPKLLIYAAGSLQN | SSWLA | QN | FPRT |
| | | GVPSRFSGSGSGTDFTLTISSLQPEDFATY | (SEQ ID | (SEQ ID | (SEQ ID |
| | | FCQQADSFPRTFGQGTKLEIK | NO: 16) | NO: 293) | NO: 43) |
| | | (SEQ ID NO: 298) | | | |
| V83 | LV-205 | DIQMTQSPSSVSASVGDRVTITCRASQGI | RASQGI | AASSLQ | QQAVS |
| | | SSWLAWYQQKPGKAPKLLIYAASSLQN | SSWLA | N | FPRT |
| | | GVPSRFSGSGSGTDFTLTISSLQPEDFATY | (SEQ ID | (SEQ ID | (SEQ ID |
| | | FCQQAVSFPRTFGQGTKLEIK | NO: 16) | NO: 28) | NO: 271) |
| | | (SEQ ID NO: 299) | | | |
| V90 | LV-206 | DIQMTQSPSSVSASVGDRVTITCRASQGI | RASQGI | AASSLQ | QQADS |
| | | SRWLAWYQQKPGKAPKLLIYAASSLQN | SRWLA | N | FPRT |
| | | GVPSRFSGSGSGTDFTLTISSLQPEDFATY | (SEQ ID | (SEQ ID | (SEQ ID |
| | | FCQQADSFPRTFGQGTKLEIK | NO: 291) | NO: 28) | NO: 43) |
| | | (SEQ ID NO: 300) | | | |

TABLE A13
Heavy Chain Variable Region Amino Acid Sequences for Reduced Affinity TREM2 Antibodies

| Variant | VH | | FR1/CDRH1 | | | |
|---|---|---|---|---|---|---|
| Ab ID. | Group | VH Amino Acid Sequence | border | CDRH1 | CDRH2 | CDRH3 |
| 6E7 | HV-15 | EVQLVQSGAEVKKPGESLKISCK | YSFT | SYWIA | IIYPGD | QRTFYY |
| | | GSGYSFTSYWIAWVRQMPGKG | (SEQ ID | (SEQ ID | SDTRYS | DSSDYF |
| | | LEWMGIIYPGDSDTRYSPSFQGQ | NO: 163) | NO: 85) | PSFQG | DY |
| | | VTISADKSISTAYLQWSSLKASD | | | (SEQ ID | (SEQ ID |
| | | TAMYFCARQRTFYYDSSDYFDY | | | NO: 91) | NO: 107) |
| | | WGQGTLVTVSS | | | | |
| | | (SEQ ID NO: 124) | | | | |
| V9 | HV- | EVQLVQSGAEVKKPGESLKISCK | YSFT | SYWIA | IIYPGD | QRGFYY |
| | 201 | GSGYSFTSYWIAWVRQMPGKG | (SEQ ID | (SEQ ID | SDTRYS | DSSDYF |
| | | LEWMGIIYPGDSDTRYSPSFQGQ | NO: 163) | NO: 85) | PSFQG | DY |
| | | VTISADKSISTAYLQWSSLKASD | | | (SEQ ID | (SEQ ID |
| | | TAMYFCARQRGFYYDSSDYFDY | | | NO: 91) | NO: 304) |
| | | WGQGTLVTVSS | | | | |
| | | (SEQ ID NO: 307) | | | | |
| V10 | HV-15 | EVQLVQSGAEVKKPGESLKISCK | YSFT | SYWIA | IIYPGD | QRTFYY |
| V23 | | GSGYSFTSYWIAWVRQMPGKG | (SEQ ID | (SEQ ID | SDTRYS | DSSDYF |
| V57 | | LEWMGIIYPGDSDTRYSPSFQGQ | NO: 163) | NO: 85) | PSFQG | DY |
| V70 | | VTISADKSISTAYLQWSSLKASD | | | (SEQ ID | (SEQ ID |
| V83 | | TAMYFCARQRTFYYDSSDYFDY | | | NO: 91) | NO: 107) |
| | | WGQGTLVTVSS | | | | |
| | | (SEQ ID NO: 124) | | | | |
| V30 | HV- | EVQLVQSGAEVKKPGESLKISCK | SSFT | SYWIA | IIYPGD | QRTFYY |
| | 202 | GSGSSFTSYWIAWVRQMPGKGL | (SEQ ID | (SEQ ID | SDTRYS | DSSDYF |
| | | EWMGIIYPGDSDTRYSPSFQGQV | NO: 301) | NO: 85) | PSFQG | DY |
| | | TISADKSISTAYLQWSSLKASDT | | | (SEQ ID | (SEQ ID |
| | | AMYFCARQRTFYYDSSDYFDY | | | NO: 91) | NO: 107) |
| | | WGQGTLVTVSS | | | | |
| | | (SEQ ID NO: 308) | | | | |
| V33 | HV- | EVQLVQSGAEVKKPGESLKISCK | YSFT | SYWIA | IIYPGD | QRTFYG |
| | 203 | GSGYSFTSYWIAWVRQMPGKG | (SEQ ID | (SEQ ID | SDTRYS | DSSDYF |
| | | LEWMGIIYPGDSDTRYSPSFQGQ | NO: 163) | NO: 85) | PSFQG | DY |
| | | VTISADKSISTAYLQWSSLKASD | | | (SEQ ID | (SEQ ID |
| | | TAMYFCARQRTFYGDSSDYFDY | | | NO: 91) | NO: 305) |
| | | WGQGTLVTVSS | | | | |
| | | (SEQ ID NO: 309) | | | | |
| V44 | HV- | EVQLVQSGAEVKKPGESLKISCK | YSFT | SYWIA | IIYPSDS | QRTFYY |
| | 204 | GSGYSFTSYWIAWVRQMPGKG | (SEQ ID | (SEQ ID | DTRYSP | DSSDYF |
| | | LEWMGIIYPSDSDTRYSPSFQGQ | NO: 163) | NO: 85) | SFQG | DY |
| | | VTISADKSISTAYLQWSSLKASD | | | (SEQ ID | (SEQ ID |
| | | TAMYFCARQRTFYYDSSDYFDY | | | NO: 303) | NO: 107) |
| | | WGQGTLVTVSS | | | | |
| | | (SEQ ID NO: 310) | | | | |
| V68 | HV- | EVQLVQSGAEVKKPGESLKISCK | YSFT | SYWIA | IIYPGD | QRTFRY |
| | 205 | GSGYSFTSYWIAWVRQMPGKG | (SEQ ID | (SEQ ID | SDTRYS | DSSDYF |
| | | LEWMGIIYPGDSDTRYSPSFQGQ | NO: 163) | NO: 85) | PSFQG | DY |
| | | VTISADKSISTAYLQWSSLKASD | | | (SEQ ID | (SEQ ID |
| | | TAMYFCARQRTFRYDSSDYFDY | | | NO: 91) | NO: 306) |
| | | WGQGTLVTVSS | | | | |
| | | (SEQ ID NO: 311) | | | | |
| V90 | HV- | EVQLVQSGAEVKKPGESLKISCK | YSFT | SEWIA | IIYPGD | QRTFYY |
| | 206 | GSGYSFTSEWIAWVRQMPGKGL | (SEQ ID | (SEQ ID | SDTRYS | DSSDYF |
| | | EWMGIIYPGDSDTRYSPSFQGQV | NO: 163) | NO: 302) | PSFQG | DY |
| | | TISADKSISTAYLQWSSLKASDT | | | (SEQ ID | (SEQ ID |
| | | AMYFCARQRTFYYDSSDYFDY | | | NO: 91) | NO: 107) |
| | | WGQGTLVTVSS | | | | |
| | | (SEQ ID NO: 312) | | | | |

[0227] In some embodiments, the TREM2 agonist antigen binding proteins of the invention may comprise one or more of the CDRs from the reduced affinity variants presented in TABLE A12 (light chain CDRs; i.e. CDRLs) and TABLE A13 (heavy chain CDRs, i.e. CDRHs). In some embodiments, the TREM2 agonist antigen binding proteins comprise a consensus CDR sequence derived from the reduced affinity variants. For instance, in one embodiment, the TREM2 agonist antigen binding proteins comprise a CDRL1 consensus sequence of X₁ASQGISX₂WLA (SEQ ID NO:284), where X₁ is R or A; and X₂ is S or R. In another embodiment, the TREM2 agonist antigen binding proteins comprise a CDRL2 consensus sequence of X₁AX₂SLQN (SEQ ID NO:285), where X₁ is A or S; and X₂ is S or G. In another embodiment, the TREM2 agonist antigen binding proteins comprise a CDRL3 consensus sequence of QQAX₁SFPX₂T (SEQ ID NO:286), where X₁ is D or V; and X₂ is R or L. In another embodiment, the TREM2 agonist antigen binding proteins comprise a CDRH1 consensus sequence of SX₁WIA (SEQ ID NO:287), where X₁ is Y or E. In yet another embodiment, the TREM2 agonist antigen binding proteins comprise a CDRH2 consensus sequence of IIYPX₁DSDTRYSPSFQG (SEQ ID NO:288), where X₁ is G or S. In still another embodiment, the TREM2 agonist antigen binding proteins comprise a CDRH3 consensus sequence of QRX₁FX₂X₃DSSDYFDY (SEQ ID NO:289), where X₁ is T or G; X₂ is Y or R; and X₃ is Y or G. In some embodiments, the TREM2 agonist antigen binding proteins comprise a light chain variable region comprising complementarity determining regions CDRL1, CDRL2, and CDRL3 and a heavy chain variable region comprising complementarity determining regions CDRH1, CDRH2, and CDRH3, wherein CDRL1 comprises the sequence of SEQ ID NO:284, CDRL2 comprises the consensus sequence of SEQ ID NO:285, CDRL3 comprises the consensus sequence of SEQ ID NO:286, CDRH1 comprises the sequence of SEQ ID NO:287, CDRH2 comprises the consensus sequence of SEQ ID NO:288, and CDRH3 comprises the consensus sequence of SEQ ID NO:289.

[0228] In some embodiments, the TREM2 agonist antigen binding proteins of the invention comprise a CDRL1 comprising a sequence selected from SEQ ID NOS:16, 290, and 291; a CDRL2 comprising a sequence selected from SEQ ID NOS:28, 292, and 293; a CDRL3 comprising a sequence selected from SEQ ID NOS:43, 294, and 271; a CDRH1 comprising the sequence of SEQ ID NO:85 or SEQ ID NO:302; a CDRH2 comprising the sequence of SEQ ID NO:91 or SEQ ID NO:303; and a CDRH3 comprising a sequence selected from SEQ ID NOS:107 and 304-306.

[0229] In some embodiments, the TREM2 agonist antigen binding proteins of the invention comprise a light chain variable region comprising a CDRL1, a CDRL2, and a CDRL3, wherein: (a) CDRL1, CDRL2, and CDRL3 have the sequence of SEQ ID NOS:16, 28, and 43, respectively;
[0230] (b) CDRL1, CDRL2, and CDRL3 have the sequence of SEQ ID NOS:16, 292, and 43, respectively;
[0231] (c) CDRL1, CDRL2, and CDRL3 have the sequence of SEQ ID NOS: 16, 28, and 294, respectively;
[0232] (d) CDRL1, CDRL2, and CDRL3 have the sequence of SEQ ID NOS:290, 28, and 43, respectively;
[0233] (e) CDRL1, CDRL2, and CDRL3 have the sequence of SEQ ID NOS: 16, 293, and 43, respectively;
[0234] (f) CDRL1, CDRL2, and CDRL3 have the sequence of SEQ ID NOS:16, 28, and 271, respectively; or
[0235] (g) CDRL1, CDRL2, and CDRL3 have the sequence of SEQ ID NOS:291, 28, and 43, respectively.

[0236] In related embodiments, the TREM2 agonist antigen binding proteins of the invention comprise a heavy chain variable region comprising a CDRH1, a CDRH2, and a CDRH3, wherein:
[0237] (a) CDRH1, CDRH2, and CDRH3 have the sequence of SEQ ID NOS:85, 91, and 304, respectively;
[0238] (b) CDRH1, CDRH2, and CDRH3 have the sequence of SEQ ID NOS:85, 91, and 107, respectively;
[0239] (c) CDRH1, CDRH2, and CDRH3 have the sequence of SEQ ID NOS:85, 91, and 305, respectively;
[0240] (d) CDRH1, CDRH2, and CDRH3 have the sequence of SEQ ID NOS:85, 303, and 107, respectively;
[0241] (e) CDRH1, CDRH2, and CDRH3 have the sequence of SEQ ID NOS:85, 91, and 306, respectively; or
[0242] (f) CDRH1, CDRH2, and CDRH3 have the sequence of SEQ ID NOS:302, 91, and 107, respectively.

[0243] In some embodiments, the TREM2 agonist antigen binding proteins of the invention comprise a light chain variable region comprising a CDRL1, a CDRL2, and a CDRL3 and a heavy chain variable region comprising a CDRH1, a CDRH2, and a CDRH3, wherein:
[0244] (a) CDRL1, CDRL2, and CDRL3 have the sequence of SEQ ID NOS: 16, 28, and 43, respectively, and CDRH1, CDRH2, and CDRH3 have the sequence of SEQ ID NOS:85, 91, and 304, respectively;
[0245] (b) CDRL1, CDRL2, and CDRL3 have the sequence of SEQ ID NOS:16, 292, and 43, respectively, and CDRH1, CDRH2, and CDRH3 have the sequence of SEQ ID NOS:85, 91, and 107, respectively;
[0246] (c) CDRL1, CDRL2, and CDRL3 have the sequence of SEQ ID NOS: 16, 28, and 294, respectively, and CDRH1, CDRH2, and CDRH3 have the sequence of SEQ ID NOS:85, 91, and 107, respectively;
[0247] (d) CDRL1, CDRL2, and CDRL3 have the sequence of SEQ ID NOS: 16, 28, and 43, respectively, and CDRH1, CDRH2, and CDRH3 have the sequence of SEQ ID NOS:85, 91, and 107, respectively;
[0248] (e) CDRL1, CDRL2, and CDRL3 have the sequence of SEQ ID NOS: 16, 28, and 43, respectively, and CDRH1, CDRH2, and CDRH3 have the sequence of SEQ ID NOS:85, 91, and 305, respectively;
[0249] (f) CDRL1, CDRL2, and CDRL3 have the sequence of SEQ ID NOS: 16, 28, and 43, respectively, and CDRH1, CDRH2, and CDRH3 have the sequence of SEQ ID NOS:85, 303, and 107, respectively;
[0250] (g) CDRL1, CDRL2, and CDRL3 have the sequence of SEQ ID NOS:290, 28, and 43, respectively, and CDRH1, CDRH2, and CDRH3 have the sequence of SEQ ID NOS:85, 91, and 107, respectively;
[0251] (h) CDRL1, CDRL2, and CDRL3 have the sequence of SEQ ID NOS: 16, 28, and 43, respectively, and CDRH1, CDRH2, and CDRH3 have the sequence of SEQ ID NOS:85, 91, and 306, respectively;
[0252] (i) CDRL1, CDRL2, and CDRL3 have the sequence of SEQ ID NOS:16, 293, and 43, respectively, and CDRH1, CDRH2, and CDRH3 have the sequence of SEQ ID NOS:85, 91, and 107, respectively;
[0253] (j) CDRL1, CDRL2, and CDRL3 have the sequence of SEQ ID NOS:16, 28, and 271, respectively, and CDRH1, CDRH2, and CDRH3 have the sequence of SEQ ID NOS:85, 91, and 107, respectively; or
[0254] (k) CDRL1, CDRL2, and CDRL3 have the sequence of SEQ ID NOS:291, 28, and 43, respectively, and CDRH1, CDRH2, and CDRH3 have the sequence of SEQ ID NOS:302, 91, and 107, respectively.

[0255] In some embodiments, the TREM2 agonist antigen binding proteins of the invention may comprise a light chain variable region selected from LV-16, LV-201, LV-202, LV-203, LV-204, LV-205, and LV-206, as shown in TABLE A12, and/or a heavy chain variable region selected from HV-15, HV-201, HV-202, HV-203, HV-204, HV-205, and HV-206, as shown in TABLE A13, or sequences that are at least 80% identical, at least 85% identical, at least 90% identical, or at least 95% identical to any of the sequences in TABLES A12 and A13. For instance, in certain embodiments, the TREM2 agonist antigen binding proteins comprise a light chain variable region comprising (i) a sequence that is at least 90% identical to a sequence selected from SEQ ID NOS:61 and 295-300, (ii) a sequence that is at least 95% identical to a sequence selected from SEQ ID NOS:61 and 295-300, or (iii) a sequence selected from SEQ ID NOS:61 and 295-300. In related embodiments, the TREM2 agonist antigen binding proteins comprise a heavy chain variable region comprising (i) a sequence that is at least 90% identical to a sequence selected from SEQ ID NOS:124 and 307-312, (ii) a sequence that is at least 95% identical to a sequence selected from SEQ ID NOS:124 and 307-312, or (iii) a sequence selected from SEQ ID NOS: 124 and 307-312.

[0256] In some embodiments, each of the light chain variable regions listed in TABLE A12 may be combined with any of the heavy chain variable regions listed in TABLE A13 to form an anti-TREM2 binding domain of the antigen binding proteins of the invention. Examples of such combinations include, but are not limited to: LV-16 (SEQ ID NO:61) and HV-201 (SEQ ID NO:307); LV-201 (SEQ ID NO:295) and HV-15 (SEQ ID NO: 124); LV-202 (SEQ ID NO:296) and HV-15 (SEQ ID NO: 124); LV-16 (SEQ ID NO:61) and HV-202 (SEQ ID NO:308); LV-16 (SEQ ID NO:61) and HV-203 (SEQ ID NO:309); LV-16 (SEQ ID NO:61) and HV-204 (SEQ ID NO:310); LV-203 (SEQ ID NO:297) and HV-15 (SEQ ID NO: 124); LV-16 (SEQ ID NO:61) and HV-205 (SEQ ID NO:311); LV-204 (SEQ ID NO:298) and HV-15 (SEQ ID NO: 124); LV-205 (SEQ ID NO:299) and HV-15 (SEQ ID NO: 124); and LV-206 (SEQ ID NO:300) and HV-206 (SEQ ID NO:312).

[0257] In some embodiments, the TREM2 agonist antigen binding proteins comprise one or more CDRs of the anti-TREM2 antibody variants set forth in TABLE A14. In some embodiments, the TREM2 agonist antigen binding proteins comprise the light chain variable region and heavy chain variable region of the anti-TREM2 antibody variants set forth in TABLE A14.

TABLE A14
Exemplary Variable Region Amino Acid Sequences of Engineered Antibodies

| Ab ID. | LC variable region | CDRL1 | CDRL2 | CDRL3 |
|---|---|---|---|---|
| 24G6 | DIVMTQSPDSLAVSLGERATINCKSSQSVLY | KSSQSV | WASTR | QQYYS |
| (SST28347 | SSNNKHFLAWYQQKPGQPPKLLIYWASTRLYSSN | LYSSNN | ES | TPLT |
| and | ESGVPDRFSGSGSGTDFTLTISSLQAEDVAV | KHFLA | (SEQ ID | (SEQ ID |
| SST204812) | YYCQQYYSTPLTFGGGTKVEIK | NO: 8) | NO: 22) | NO: 35) |
| | (SEQ ID NO: 326) | | | |
| 6E7 | DIQMTQSPSSVSASVGDRVTITCRASQGISS | RASQGI | AASSLQ | QQADA |
| (SST29857) | WLAWYQQKPGKAPKLLIYAASSLQSGVPS | SSWLA | S | FPRT |
| | RFSGSGSGTDFTLTISSLQPEDFATYFCQQA | (SEQ ID | (SEQ ID | (SEQ ID |
| | DAFPRTFGQGTKLEIK (SEQ ID NO: 328) | NO: 16) | NO: 369) | NO: 370) |
| 13E7 | EIVMTQSPATLSVSPGERATLSCRASQSVSS | RASQS | GASTR | LQDNN |
| (SST202443) | NLAWFQQKPGQAPRLLIYGASTRATGIPAR | VSSNLA | AT | FPPT |
| | FSGSGSGTEFTLTISSLQPEDFAVYYCLQDN | (SEQ ID | (SEQ ID | (SEQ ID |
| | NFPPTFGQGTKVDIK (SEQ ID NO: 330) | NO: 10) | NO: 23) | NO: 372) |
| 5E3 | DIQMTQSPSSLSASVGDRVTITCRASQGISN | RASQGI | AASSLQ | QQYST |
| (SST29825) | YLAWYQQKPGKAPKSLIYAASSLQSGVPSR | SNYLA | S | YPFT |
| | FSGSGSGTDFTLTISSLQPEDFATYYCQQYS | (SEQ ID | (SEQ ID | (SEQ ID |
| | TYPFTFGQGTKVDIK (SEQ ID NO: 332) | NO: 17) | NO: 29) | NO: 44) |
| Ab ID. | HC variable region | CDRH1 | CDRH2 | CDRH3 |
| 24G6 | EVQLLESGGGLVQPGGSLRLSCAASGFTFS | SYAMS | AISGSG | AYTPM |
| (SST28347 | SYAMSWVRQAPGKGLEWVSAISGSGGSTY | (SEQ ID | GSTYY | AFFDY |
| and | YAESVKGRFTISRDNSKNTLYLQMNSLRAE | NO: 77) | AESVK | (SEQ ID |
| SST204812) | DTAVYYCAKAYTPMAFFDYWGQGTLVTV | | G | NO: 98) |
| | SS (SEQ ID NO: 327) | | (SEQ ID | |
| | | | NO: 368) | |
| 6E7 | EVQLVQSGAEVKKPGESLKISCKGSGYSFT | SYWIA | IIYPGD | QRTFY |
| (SST29857) | SYWIAWVRQMPGKGLEWMGITYPGDADA | (SEQ ID | ADARY | YDSSD |
| | RYSPSFQGQVTISADKSISTAYLQWSSLKAS | NO: 85) | SPSFQG | YFDY |
| | DTAMYFCARQRTFYYDSSDYFDYWGQGT | | (SEQ ID | (SEQ ID |
| | LVTVSS (SEQ ID NO: 329) | | NO: 371) | NO: 107) |
| 13E7 | EVQLVQSGAEVKKPGESLKISCKGSGYSFT | SWIG | IIYPGD | RRQGIF |
| (SST202443) | SYWIGWVRQMPGKGLEWMGITYPGDADA | (SEQ ID | ADARY | GDALD |
| | RYSPSFQGQVTISADKSISTAYLQWSSLKAS | NO: 81) | SPSFQG | F |
| | DTAMYFCARRRQGIFGDALDFWGQGTLVT | | (SEQ ID | (SEQ ID |
| | VSS (SEQ ID NO: 331) | | NO: 373) | NO: 374) |
| | QVQLVQSGAEVKKPGASVKVSCKASGYTF | GYYIH | WINPYS | DAGYL |
| | TGYYIHWVRQAPGQGLEWMGWINPYSGG | (SEQ ID | GGTTS | ALYGT |
| | TTSAQKFQGRVTMTRDTSTSSAYMELSRLR | NO: 86) | AQKFQ | DV |
| | SDDTAVYYCARDAGYLALYGTDVWGQGT | | G | (SEQ ID |
| | LVTVSS (SEQ ID NO: 333) | | (SEQ ID | NO: 375 |
| | | | NO: 94 | |

[0258] In some embodiments, the TREM2 agonist antigen binding protein comprises a light chain variable region comprising a CDRL1, a CDRL2, and a CDRL3, wherein:
[0259] (a) CDRL1, CDRL2, and CDRL3 have the sequence of SEQ ID NOS: 16, 369, and 370, respectively;
[0260] (b) CDRL1, CDRL2, and CDRL3 have the sequence of SEQ ID NOS: 10, 23, and 372, respectively; or
[0261] (c) CDRL1, CDRL2, and CDRL3 have the sequence of SEQ ID NOS:6, 21, and 33, respectively;
[0262] (d) CDRL1, CDRL2, and CDRL3 have the sequence of SEQ ID NOS:6, 20, and 33, respectively.

[0263] In some embodiments, the TREM2 agonist antigen binding protein comprises a heavy chain variable region comprising a CDRH1, a CDRH2, and a CDRH3, wherein:
[0264] (a) CDRH1, CDRH2, and CDRH3 have the sequence of SEQ ID NOS:77, 368, and 98, respectively;
[0265] (b) CDRH1, CDRH2, and CDRH3 have the sequence of SEQ ID NOS:85, 371, and 107, respectively;
[0266] (c) CDRH1, CDRH2, and CDRH3 have the sequence of SEQ ID NOS:81, 373, and 374, respectively; or
[0267] (d) CDRH1, CDRH2, and CDRH3 have the sequence of SEQ ID NOS:86, 94, and 375, respectively.

[0268] In some embodiments, the TREM2 agonist antigen binding protein comprises a light chain variable region comprising a CDRL1, a CDRL2, and a CDRL3 and a heavy chain variable region comprising a CDRH1, a CDRH2, and a CDRH3, wherein:
[0269] (a) CDRL1, CDRL2, and CDRL3 have the sequence of SEQ ID NOS:8, 22, and 35, respectively, and CDRH1, CDRH2, and CDRH3 have the sequence of SEQ ID NOS:77, 368, and 98, respectively;
[0270] (b) CDRL1, CDRL2, and CDRL3 have the sequence of SEQ ID NOS:16, 369, and 370, respectively, and CDRH1, CDRH2, and CDRH3 have the sequence of SEQ ID NOS:85, 371, and 107, respectively;
[0271] (c) CDRL1, CDRL2, and CDRL3 have the sequence of SEQ ID NOS: 10, 23, and 372, respectively, and CDRH1, CDRH2, and CDRH3 have the sequence of SEQ ID NOS:81, 373, and 374, respectively; or
[0272] (d) CDRL1, CDRL2, and CDRL3 have the sequence of SEQ ID NOS: 17, 29, and 44, respectively, and CDRH1, CDRH2, and CDRH3 have the sequence of SEQ ID NOS:86, 94, and 375, respectively.

[0273] Accordingly, in some embodiments, the TREM2 agonist antigen binding protein comprises a light chain variable region comprising a CDRL1, a CDRL2, and a CDRL3, and a heavy chain variable region comprising a CDRH1, a CDRH2, and a CDRH3, wherein the CDRL1, CDRL2, and CDRL3 have the sequence of SEQ ID NOS: 10, 23, and 372, respectively, and the CDRH1, CDRH2, and CDRH3 have the sequence of SEQ ID NOS:81, 373, and 374, respectively.

[0274] In some embodiments therefore, the present invention provides a method of treating ALSP in a human patient, the method comprising administering to the patient an effective amount of a TREM2 agonist antigen binding protein comprising a CDRL1, CDRL2, and CDRL3 having the sequence of SEQ ID NOS:10, 23, and 372, respectively, and a CDRH1, CDRH2, and CDRH3 having the sequence of SEQ ID NOS:81, 373, and 374, respectively. In certain embodiments, the antibody is human. In some embodiments, the TREM2 agonist antigen binding protein comprises
[0275] (a) a light chain variable region comprising the amino acid sequence of SEQ ID NO:326 and a heavy chain variable region comprising the amino acid sequence of SEQ ID NO:327;
[0276] (b) a light chain variable region comprising the amino acid sequence of SEQ ID NO:328 and a heavy chain variable region comprising the amino acid sequence of SEQ ID NO:329;
[0277] (c) a light chain variable region comprising the amino acid sequence of SEQ ID NO:330 and a heavy chain variable region comprising the amino acid sequence of SEQ ID NO:331; or
[0278] (d) a light chain variable region comprising the amino acid sequence of SEQ ID NO:332 and a heavy chain variable region comprising the amino acid sequence of SEQ ID NO:333.

[0279] In some embodiments, the TREM2 agonist antigen binding protein comprises a light chain variable region comprising the amino acid sequence of SEQ ID NO:330 and a heavy chain variable region comprising the amino acid sequence of SEQ ID NO:331.

[0280] In some embodiments therefore, the present invention provides a method of treating ALSP in a human patient, the method comprising administering to the patient an effective amount of a TREM2 agonist antigen binding protein comprising a light chain variable region comprising the amino acid sequence of SEQ ID NO:330 and a heavy chain variable region comprising the amino acid sequence of SEQ ID NO:331. In certain embodiments, the antibody is human.

[0281] In some embodiments, the TREM2 agonist antigen binding proteins of the invention comprise a light chain variable region consisting of or consisting essentially of the amino acid sequence of SEQ ID NO:326, 328, 330 or 332. In some embodiments, the TREM2 agonist antigen binding proteins of the invention comprise a heavy chain variable region consisting of or consisting essentially of the amino acid sequence of SEQ ID NO:327, 329, 331 or 333. In a specific embodiment, the TREM2 agonist antigen binding proteins of the invention comprise a light chain variable region and a heavy chain variable region, wherein the light chain variable region consisting of or consisting essentially of the amino acid sequence of SEQ ID NO:326 and the heavy chain variable region consisting of or consisting essentially of the amino acid sequence of SEQ ID NO:327. In a specific embodiment, the TREM2 agonist antigen binding proteins of the invention comprise a light chain variable region and a heavy chain variable region, wherein the light chain variable region consisting of or consisting essentially of the amino acid sequence of SEQ ID NO:328 and the heavy chain variable region consisting of or consisting essentially of the amino acid sequence of SEQ ID NO:329. In a specific embodiment, the TREM2 agonist antigen binding proteins of the invention comprise a light chain variable region and a heavy chain variable region, wherein the light chain variable region consisting of or consisting essentially of the amino acid sequence of SEQ ID NO:330 and the heavy chain variable region consisting of or consisting essentially of the amino acid sequence of SEQ ID NO:331. In a specific embodiment, the TREM2 agonist antigen binding proteins of the invention comprise a light chain variable region and a heavy chain variable region, wherein the light chain variable region consisting of or consisting essentially of the amino acid sequence of SEQ ID NO:332 and the heavy chain variable region consisting of or consisting essentially of the amino acid sequence of SEQ ID NO:333.

[0282] In some embodiments, each of the light chain variable regions disclosed in TABLES A1, A10, A12, and A14 and each of the heavy chain variable regions disclosed in TABLES A2, A11, A13, and 3E may be attached to the light chain constant regions (TABLE EN1) and heavy chain constant regions (EN2) to form complete antibody light and heavy chains, respectively, as further discussed below. Further, each of the generated heavy and light chain sequences may be combined to form a complete antibody structure. It should be understood that the heavy chain and light chain variable regions provided herein can also be attached to other constant domains having different sequences than the exemplary sequences listed herein.

[0283] In some embodiments, exemplary TREM2 agonist antibody having a light chain variable region with a light chain constant domain and a heavy chain variable region with a heavy chain constant region are disclosed in TABLE A15.

TABLE A15
Light Chain and Heavy Chain Amino Acid Sequences
of Exemplary Antibodies

| Ab ID. | | Sequence |
|---|---|---|
| 24G6 | LC | MDMRVPAQLLGLLLLWLRGARCDIVMTQSPDSLAVSLGERATIN |
| (SST28347) | | CKSSQSVLYSSNNKHFLAWYQQKPGQPPKLLIYWASTRESGVPD |
| | | RFSGSGSGTDFTLTISSLQAEDVAVYYCQQYYSTPLTFGGGTKVE |
| | | IKRTVAAPSVFIFPPSDEQLKSGTASVVCLLNNFYPREAKVQWKV |
| | | DNALQSGNSQESVTEQDSKDSTYSLSSTLTLSKADYEKHKVYAC |
| | | EVTHQGLSSPVTKSFNRGEC (SEQ ID NO: 334) |
| | HC | MDMRVPAQLLGLLLLWLRGARCEVQLLESGGGLVQPGGSLRLS |
| | | CAASGFTFSSYAMSWVRQAPGKGLEWVSAISGSGGSTYYAESVK |
| | | GRFTISRDNSKNTLYLQMNSLRAEDTAVYYCAKAYTPMAFFDY |
| | | WGQGTLVTVSSASTKGPSVFPLAPSSKSTSGGTAALGCLVKDYFP |
| | | EPVTVSWNSGALTSGVHTFPAVLQSSGLYSLSSVVTVPSSSLGTQ |
| | | TYICNVNHKPSNTKVDKKVEPKSCDKTHTCPPCPAPELLGGPSVF |
| | | LFPPKPKDTLMISRTPEVTCVVVDVSHEDPEVKFNWYVDGVEVH |
| | | NAKTKPCEEQYGSTYRCVSVLTVLHQDWLNGKEYKCKVSNKAL |
| | | PAPIEKTISKAKGQPREPQVYTLPPSREEMTKNQVSLTCLVKGFY |
| | | PSDIAVEWESNGQPENNYKTTPPVLDSDGSFFLYSKLTVDKSRW |
| | | QQGNVFSCSVMHEALHNHYTQKSLSLSPGK (SEQ ID NO: 335) |
| 24G6 | LC | MDMRVPAQLLGLLLLWLRGARCDIVMTQSPDSLAVSLGERATIN |
| (SST204812) | | CKSSQSVLYSSNNKHFLAWYQQKPGQPPKLLIYWASTRESGVPD |
| | | RFSGSGSGTDFTLTISSLQAEDVAVYYCQQYYSTPLTFGGGTKVE |
| | | IKRTVAAPSVFIFPPSDEQLKSGTASVVCLLNNFYPREAKVQWKV |
| | | DNALQSGNSQESVTEQDSKDSTYSLSSTLTLSKADYEKHKVYAC |
| | | EVTHQGLSSPVTKSFNRGEC (SEQ ID NO: 334) |
| | HC | MDMRVPAQLLGLLLLWLRGARCEVQLLESGGGLVQPGGSLRLS |
| | | CAASGFTFSSYAMSWVRQAPGKGLEWVSAISGSGGSTYYAESVK |
| | | GRFTISRDNSKNTLYLQMNSLRAEDTAVYYCAKAYTPMAFFDY |
| | | WGQGTLVTVSSASTKGPSVFPLAPSSRSTSESTAALGCLVKDYFP |
| | | EPVTVSWNSGALTSGVHTFPAVLQSSGLYSLSSVVTVPSSNFGTQ |
| | | TYTCNVDHKPSNTKVDKTVERKCCVECPPCPAPELLGGPSVFLFP |
| | | PKPKDTLMISRTPEVTCVVVDVSHEDPEVKFNWYVDGVEVHNA |
| | | KTKPCEEQYGSTYRCVSVLTVLHQDWLNGKEYKCKVSNKALPA |
| | | PIEKTISKAKGQPREPQVYTLPPSREEMTKNQVSLTCLVKGFYPS |
| | | DIAVEWESNGQPENNYKTTPPVLDSDGSFFLYSKLTVDKSRWQQ |
| | | GNVFSCSVMHEALHNHYTQKSLSLSPGK (SEQ ID NO: 336) |
| 6E7 | LC | MDMRVPAQLLGLLLLWLRGARCDIQMTQSPSSVSASVGDRVTIT |
| (SST29857) | | CRASQGISSWLAWYQQKPGKAPKLLIYAASSLQSGVPSRFSGSGS |
| | | GTDFTLTISSLQPEDFATYFCQQADAFPRTFGQGTKLEIKRTVAAP |
| | | SVFIFPPSDEQLKSGTASVVCLLNNFYPREAKVQWKVDNALQSG |
| | | NSQESVTEQDSKDSTYSLSSTLTLSKADYEKHKVYACEVTHQGL |
| | | SSPVTKSFNRGEC (SEQ ID NO: 337) |
| | HC | MDMRVPAQLLGLLLLWLRGARCEVQLVQSGAEVKKPGESLKIS |
| | | CKGSGYSFTSYWIAWVRQMPGKGLEWMGITYPGDADARYSPSF |
| | | QGQVTISADKSISTAYLQWSSLKASDTAMYFCARQRTFYYDSSD |
| | | YFDYWGQGTLVTVSSASTKGPSVFPLAPSSRSTSESTAALGCLVK |
| | | DYFPEPVTVSWNSGALTSGVHTFPAVLQSSGLYSLSSVVTVPSSN |
| | | FGTQTYTCNVDHKPSNTKVDKTVERKCCVECPPCPAPELLGGPS |
| | | VFLFPPKPKDTLMISRTPEVTCVVVDVSHEDPEVKFNWYVDGVE |
| | | VHNAKTKPCEEQYGSTYRCVSVLTVLHQDWLNGKEYKCKVSNK |
| | | ALPAPIEKTISKAKGQPREPQVYTLPPSREEMTKNQVSLTCLVKG |
| | | FYPSDIAVEWESNGQPENNYKTTPPVLDSDGSFFLYSKLTVDKSR |
| | | WQQGNVFSCSVMHEALHNHYTQKSLSLSPGK (SEQ ID NO: 338) |
| 13E7 | LC | MDMRVPAQLLGLLLLWLRGARCEIVMTQSPATLSVSPGERATLS |
| (SST202443) | | CRASQSVSSNLAWFQQKPGQAPRLLIYGASTRATGIPARFSGSGS |
| | | GTEFTLTISSLQPEDFAVYYCLQDNNFPPTFGQGTKVDIKRTVAA |
| | | PSVFIFPPSDEQLKSGTASVVCLLNNFYPREAKVQWKVDNALQS |
| | | GNSQESVTEQDSKDSTYSLSSTLTLSKADYEKHKVYACEVTHQG |
| | | LSSPVTKSFNRGEC (SEQ ID NO: 339) |
| | HC | MDMRVPAQLLGLLLLWLRGARCEVQLVQSGAEVKKPGESLKIS |
| | | CKGSGYSFTSYWIGWVRQMPGKGLEWMGITYPGDADARYSPSF |
| | | QGQVTISADKSISTAYLQWSSLKASDTAMYFCARRRQGIFGDAL |
| | | DFWGQGTLVTVSSASTKGPSVFPLAPSSKSTSGGTAALGCLVKD |
| | | YFPEPVTVSWNSGALTSGVHTFPAVLQSSGLYSLSSVVTVPSSSL |
| | | GTQTYICNVNHKPSNTKVDKKVEPKSCDKTHTCPPCPAPELLGG |
| | | PSVFLFPPKPKDTLMISRTPEVTCVVVDVSHEDPEVKFNWYVDG |
| | | VEVHNAKTKPCEEQYGSTYRCVSVLTVLHQDWLNGKEYKCKVS |
| | | NKALPAPIEKTISKAKGQPREPQVYTLPPSREEMTKNQVSLTCLV |
| | | KGFYPSDIAVEWESNGQPENNYKTTPPVLDSDGSFFLYSKLTVDK |
| | | SRWQQGNVFSCSVMHEALHNHYTQKSLSLSPGK |
| | | (SEQ ID NO: 340) |
| 5E3 (SST29825) | LC | MDMRVPAQLLGLLLLWLRGARCDIQMTQSPSSLSASVGDRVTIT |
| | | CRASQGISNYLAWYQQKPGKAPKSLIYAASSLQSGVPSRFSGSGS |
| | | GTDFTLTISSLQPEDFATYYCQQYSTYPFTFGQGTKVDIKRTVAA |
| | | PSVFIFPPSDEQLKSGTASVVCLLNNFYPREAKVQWKVDNALQS |
| | | GNSQESVTEQDSKDSTYSLSSTLTLSKADYEKHKVYACEVTHQG |
| | | LSSPVTKSFNRGEC (SEQ ID NO: 341) |
| | HC | MDMRVPAQLLGLLLLWLRGARCQVQLVQSGAEVKKPGASVKV |
| | | SCKASGYTFTGYYIHWVRQAPGQGLEWMGWINPYSGGTTSAQK |
| | | FQGRVTMTRDTSTSSAYMELSRLRSDDTAVYYCARDAGYLALY |
| | | GTDVWGQGTLVTVSSASTKGPSVFPLAPSSRSTSESTAALGCLVK |
| | | DYFPEPVTVSWNSGALTSGVHTFPAVLQSSGLYSLSSVVTVPSSN |
| | | FGTQTYTCNVDHKPSNTKVDKTVERKCCVECPPCPAPELLGGPS |
| | | VFLFPPKPKDTLMISRTPEVTCVVVDVSHEDPEVKFNWYVDGVE |
| | | VHNAKTKPCEEQYGSTYRCVSVLTVLHQDWLNGKEYKCKVSNK |
| | | ALPAPIEKTISKAKGQPREPQVYTLPPSREEMTKNQVSLTCLVKG |
| | | FYPSDIAVEWESNGQPENNYKTTPPVLDSDGSFFLYSKLTVDKSR |
| | | WQQGNVFSCSVMHEALHNHYTQKSLSLSPGK (SEQ ID NO: 342) |
| 24G6-1 | LC | DIVMTQSPDSLAVSLGERATINCKSSQSVLYSSNNKHFLAWYQQ |
| (SST28347-1) | | KPGQPPKLLIYWASTRESGVPDRFSGSGSGTDFTLTISSLQAEDVA |
| | | VYYCQQYYSTPLTFGGGTKVEIKRTVAAPSVFIFPPSDEQLKSGT |
| | | ASVVCLLNNFYPREAKVQWKVDNALQSGNSQESVTEQDSKDST |
| | | YSLSSTLTLSKADYEKHKVYACEVTHQGLSSPVTKSFNRGEC |
| | | (SEQ ID NO: 2768) |
| | HC | EVQLLESGGGLVQPGGSLRLSCAASGFTFSSYAMSWVRQAPGKG |
| | | LEWVSAISGSGGSTYYAESVKGRFTISRDNSKNTLYLQMNSLRAE |
| | | DTAVYYCAKAYTPMAFFDYWGQGTLVTVSSASTKGPSVFPLAPS |
| | | SKSTSGGTAALGCLVKDYFPEPVTVSWNSGALTSGVHTFPAVLQ |
| | | SSGLYSLSSVVTVPSSSLGTQTYICNVNHKPSNTKVDKKVEPKSC |
| | | DKTHTCPPCPAPELLGGPSVFLFPPKPKDTLMISRTPEVTCVVVD |
| | | VSHEDPEVKFNWYVDGVEVHNAKTKPCEEQYGSTYRCVSVLTV |
| | | LHQDWLNGKEYKCKVSNKALPAPIEKTISKAKGQPREPQVYTLP |
| | | PSREEMTKNQVSLTCLVKGFYPSDIAVEWESNGQPENNYKTTPP |
| | | VLDSDGSFFLYSKLTVDKSRWQQGNVFSCSVMHEALHNHYTQK |
| | | SLSLSPGK (SEQ ID NO: 2769) |
| 24G6-1 | LC | DIVMTQSPDSLAVSLGERATINCKSSQSVLYSSNNKHFLAWYQQ |
| (SST28347-1) | | KPGQPPKLLIYWASTRESGVPDRFSGSGSGTDFTLTISSLQAEDVA |
| | | VYYCQQYYSTPLTFGGGTKVEIKRTVAAPSVFIFPPSDEQLKSGT |
| | | ASVVCLLNNFYPREAKVQWKVDNALQSGNSQESVTEQDSKDST |
| | | YSLSSTLTLSKADYEKHKVYACEVTHQGLSSPVTKSFNRGEC |
| | | (SEQ ID NO: 2768) |
| | HC | EVQLLESGGGLVQPGGSLRLSCAASGFTFSSYAMSWVRQAPGKG |
| | | LEWVSAISGSGGSTYYAESVKGRFTISRDNSKNTLYLQMNSLRAE |
| | | DTAVYYCAKAYTPMAFFDYWGQGTLVTVSSASTKGPSVFPLAPS |
| | | SRSTSESTAALGCLVKDYFPEPVTVSWNSGALTSGVHTFPAVLQS |
| | | SGLYSLSSVVTVPSSNFGTQTYTCNVDHKPSNTKVDKTVERKCC |
| | | VECPPCPAPELLGGPSVFLFPPKPKDTLMISRTPEVTCVVVDVSHE |
| | | DPEVKFNWYVDGVEVHNAKTKPCEEQYGSTYRCVSVLTVLHQD |
| | | WLNGKEYKCKVSNKALPAPIEKTISKAKGQPREPQVYTLPPSREE |
| | | MTKNQVSLTCLVKGFYPSDIAVEWESNGQPENNYKTTPPVLDSD |
| | | GSFFLYSKLTVDKSRWQQGNVFSCSVMHEALHNHYTQKSLSLSP |
| | | G (SEQ ID NO: 2770) |
| 6E7-1 | LC | DIQMTQSPSSVSASVGDRVTITCRASQGISSWLAWYQQKPGKAP |
| (SST29857-1) | | KLLIYAASSLQSGVPSRFSGSGSGTDFTLTISSLQPEDFATYFCQQ |
| | | ADAFPRTFGQGTKLEIKRTVAAPSVFIFPPSDEQLKSGTASVVCLL |
| | | NNFYPREAKVQWKVDNALQSGNSQESVTEQDSKDSTYSLSSTLT |
| | | LSKADYEKHKVYACEVTHQGLSSPVTKSFNRGEC |
| | | (SEQ ID NO: 2771) |
| | HC | EVQLVQSGAEVKKPGESLKISCKGSGYSFTSYWIAWVRQMPGKG |
| | | LEWMGIIYPGDADARYSPSFQGQVTISADKSISTAYLQWSSLKAS |
| | | DTAMYFCARQRTFYYDSSDYFDYWGQGTLVTVSSASTKGPSVFP |
| | | LAPSSRSTSESTAALGCLVKDYFPEPVTVSWNSGALTSGVHTFPA |
| | | VLQSSGLYSLSSVVTVPSSNFGTQTYTCNVDHKPSNTKVDKTVE |
| | | RKCCVECPPCPAPELLGGPSVFLFPPKPKDTLMISRTPEVTCVVVD |
| | | VSHEDPEVKFNWYVDGVEVHNAKTKPCEEQYGSTYRCVSVLTV |
| | | LHQDWLNGKEYKCKVSNKALPAPIEKTISKAKGQPREPQVYTLP |
| | | PSREEMTKNQVSLTCLVKGFYPSDIAVEWESNGQPENNYKTTPP |
| | | VLDSDGSFFLYSKLTVDKSRWQQGNVFSCSVMHEALHNHYTQK |
| | | SLSLSPG (SEQ ID NO: 2772) |
| 13E7-1 | LC | EIVMTQSPATLSVSPGERATLSCRASQSVSSNLAWFQQKPGQAPR |
| (SST202443-1) | | LLIYGASTRATGIPARFSGSGSGTEFTLTISSLQPEDFAVYYCLQD |
| | | NNFPPTFGQGTKVDIKRTVAAPSVFIFPPSDEQLKSGTASVVCLLN |
| | | NFYPREAKVQWKVDNALQSGNSQESVTEQDSKDSTYSLSSTLTL |
| | | SKADYEKHKVYACEVTHQGLSSPVTKSFNRGEC |
| | | (SEQ ID NO: 2773) |
| | HC | EVQLVQSGAEVKKPGESLKISCKGSGYSFTSYWIGWVRQMPGKG |
| | | LEWMGIIYPGDADARYSPSFQGQVTISADKSISTAYLQWSSLKAS |
| | | DTAMYFCARRRQGIFGDALDFWGQGTLVTVSSASTKGPSVFPLA |
| | | PSSKSTSGGTAALGCLVKDYFPEPVTVSWNSGALTSGVHTFPAV |
| | | LQSSGLYSLSSVVTVPSSSLGTQTYICNVNHKPSNTKVDKKVEPK |
| | | SCDKTHTCPPCPAPELLGGPSVFLFPPKPKDTLMISRTPEVTCVVV |
| | | DVSHEDPEVKFNWYVDGVEVHNAKTKPCEEQYGSTYRCVSVLT |
| | | VLHQDWLNGKEYKCKVSNKALPAPIEKTISKAKGQPREPQVYTL |
| | | PPSREEMTKNQVSLTCLVKGFYPSDIAVEWESNGQPENNYKTTPP |
| | | VLDSDGSFFLYSKLTVDKSRWQQGNVFSCSVMHEALHNHYTQK |
| | | SLSLSPG (SEQ ID NO: 2774) |
| 5E3-1 | LC | DIQMTQSPSSLSASVGDRVTITCRASQGISNYLAWYQQKPGKAPK |
| (SST29825-1) | | SLIYAASSLQSGVPSRFSGSGSGTDFTLTISSLQPEDFATYYCQQY |
| | | STYPFTFGQGTKVDIKRTVAAPSVFIFPPSDEQLKSGTASVVCLLN |
| | | NFYPREAKVQWKVDNALQSGNSQESVTEQDSKDSTYSLSSTLTL |
| | | SKADYEKHKVYACEVTHQGLSSPVTKSFNRGEC |
| | | (SEQ ID NO: 2775) |
| | HC | QVQLVQSGAEVKKPGASVKVSCKASGYTFTGYYIHWVRQAPGQ |
| | | GLEWMGWINPYSGGTTSAQKFQGRVTMTRDTSTSSAYMELSRL |
| | | RSDDTAVYYCARDAGYLALYGTDVWGQGTLVTVSSASTKGPSV |
| | | FPLAPSSRSTSESTAALGCLVKDYFPEPVTVSWNSGALTSGVHTF |
| | | PAVLQSSGLYSLSSVVTVPSSNFGTQTYTCNVDHKPSNTKVDKT |
| | | VERKCCVECPPCPAPELLGGPSVFLFPPKPKDTLMISRTPEVTCVV |
| | | VDVSHEDPEVKFNWYVDGVEVHNAKTKPCEEQYGSTYRCVSVL |
| | | TVLHQDWLNGKEYKCKVSNKALPAPIEKTISKAKGQPREPQVYT |
| | | LPPSREEMTKNQVSLTCLVKGFYPSDIAVEWESNGQPENNYKTTP |
| | | PVLDSDGSFFLYSKLTVDKSRWQQGNVFSCSVMHEALHNHYTQ |
| | | KSLSLSPG (SEQ ID NO: 2776) |
| 13E7 Variant | LC | EIVMTQSPATLSVSPGERATLSCRASQSVSSNLAWFQQKPGQAPR |
| | | LLIYGASTRATGIPARFSGSGSGTEFTLTISSLQPEDFAVYYCLQD |
| | | NNFPPTFGQGTKVDIKRTVAAPSVFIFPPSDEQLKSGTASVVCLLN |
| | | NFYPREAKVQWKVDNALQSGNSQESVTEQDSKDSTYSLSSTLTL |
| | | SKADYEKHKVYACEVTHQGLSSPVTKSFNRGEC |
| | | (SEQ ID NO: 2777) |
| | HC | EVQLVQSGAEVKKPGESLKISCKGSGYSFTSYWIGWVRQMPGKG |
| | | LEWMGIIYPGDADARYSPSFQGQVTISADKSISTAYLQWSSLKAS |
| | | DTAMYFCARRRQGIFGDALDFWGQGTLVTVSSASTKGPSVFPLA |
| | | PSSKSTSGGTAALGCLVKDYFPEPVTVSWNSGALTSGVHTFPAV |
| | | LQSSGLYSLSSVVTVPSSSLGTQTYICNVNHKPSNTKVDKKVEPK |
| | | SCDKTHTCPPCPAPELLGGPSVFLFPPKPKDTLMISRTPEVTCVVV |
| | | DVSHEDPEVKFNWYVDGVEVHNAKTKPCEEQYGSTYRCVSVLT |
| | | VLHQDWLNGKEYKCKVSNKALPAPIEKTISKAKGQPREPQVYTL |
| | | PPSREEMTKNQVSLTCLVKGFYPSDIAVEWESNGQPENNYKTTPP |
| | | VLDSDGSFFLYSKLTVDKSRWQQGNVFSCSVMHEALHNHYTQK |
| | | SLSLSPGK (SEQ ID NO: 2778) |

[0284] In some embodiments, the TREM2 agonist antigen binding proteins of the invention comprise a light chain comprising the sequence of SEQ ID NO:334 and a heavy chain comprising the sequence of SEQ ID NO:335. In some embodiments, the TREM2 agonist antigen binding proteins of the invention comprise a light chain comprising the sequence of SEQ ID NO:334 and a heavy chain comprising the sequence of SEQ ID NO:336. In some embodiments, the TREM2 agonist antigen binding proteins of the invention comprise a light chain comprising the sequence of SEQ ID NO:337 and a heavy chain comprising the sequence of SEQ ID NO:338. In some embodiments, the TREM2 agonist antigen binding proteins of the invention comprise a light chain comprising the sequence of SEQ ID NO:339 and a heavy chain comprising the sequence of SEQ ID NO:340. In some embodiments, the TREM2 agonist antigen binding proteins of the invention comprise a light chain comprising the sequence of SEQ ID NO:341 and a heavy chain comprising the sequence of SEQ ID NO:342. In some embodiments, the TREM2 agonist antigen binding proteins of the invention comprise a light chain comprising the sequence of SEQ ID NO:2768 and a heavy chain comprising the sequence of SEQ ID NO:2769. In some embodiments, the TREM2 agonist antigen binding proteins of the invention comprise a light chain comprising the sequence of SEQ ID NO:2768 and a heavy chain comprising the sequence of SEQ ID NO:2770. In some embodiments, the TREM2 agonist antigen binding proteins of the invention comprise a light chain comprising the sequence of SEQ ID NO:2771 and a heavy chain comprising the sequence of SEQ ID NO:2772. In some embodiments, the TREM2 agonist antigen binding proteins of the invention comprise a light chain comprising the sequence of SEQ ID NO:2773 and a heavy chain comprising the sequence of SEQ ID NO:2774. In some embodiments, the TREM2 agonist antigen binding proteins of the invention comprise a light chain comprising the sequence of SEQ ID NO:2775 and a heavy chain comprising the sequence of SEQ ID NO:2776.

[0285] In some embodiments, the present invention provides a method of treating ALSP in a human patient, the method comprising administering to the patient an effective amount of a TREM2 agonist antigen binding protein comprising a light chain comprising the sequence of SEQ ID NO:334 and a heavy chain comprising the sequence of SEQ ID NO:335. In some embodiments, the present invention provides a method of treating ALSP in a human patient, the method comprising administering to the patient an effective amount of a TREM2 agonist antigen binding protein comprising a light chain comprising the sequence of SEQ ID NO:334 and a heavy chain comprising the sequence of SEQ ID NO:336. In some embodiments, the present invention provides a method of treating ALSP in a human patient, the method comprising administering to the patient an effective amount of a TREM2 agonist antigen binding protein comprising a light chain comprising the sequence of SEQ ID NO:337 and a heavy chain comprising the sequence of SEQ ID NO:338. In some embodiments, the present invention provides a method of treating ALSP in a human patient, the method comprising administering to the patient an effective amount of a TREM2 agonist antigen binding protein comprising a light chain comprising the sequence of SEQ ID NO:339 and a heavy chain comprising the sequence of SEQ ID NO:340. In some embodiments, the present invention provides a method of treating ALSP in a human patient, the method comprising administering to the patient an effective amount of a TREM2 agonist antigen binding protein comprising a light chain comprising the sequence of SEQ ID NO:341 and a heavy chain comprising the sequence of SEQ ID NO:342. In some embodiments, the present invention provides a method of treating ALSP in a human patient, the method comprising administering to the patient an effective amount of a TREM2 agonist antigen binding protein comprising a light chain comprising the sequence of SEQ ID NO:2768 and a heavy chain comprising the sequence of SEQ ID NO:2769. In some embodiments, the present invention provides a method of treating ALSP in a human patient, the method comprising administering to the patient an effective amount of a TREM2 agonist antigen binding protein comprising a light chain comprising the sequence of SEQ ID NO:2768 and a heavy chain comprising the sequence of SEQ ID NO:2770. In some embodiments, the present invention provides a method of treating ALSP in a human patient, the method comprising administering to the patient an effective amount of a TREM2 agonist antigen binding protein comprising a light chain comprising the sequence of SEQ ID NO:2771 and a heavy chain comprising the sequence of SEQ ID NO:2772. In some embodiments therefore, the present invention provides a method of treating ALSP in a human patient, the method comprising administering to the patient an effective amount of a TREM2 agonist antigen binding protein comprising a light chain comprising the sequence of SEQ ID NO:2773 and a heavy chain comprising the sequence of SEQ ID NO:2774. In some embodiments, the present invention provides a method of treating ALSP in a human patient, the method comprising administering to the patient an effective amount of a TREM2 agonist antigen binding protein comprising a light chain comprising the sequence of SEQ ID NO:2775 and a heavy chain comprising the sequence of SEQ ID NO:2776. In some embodiments, the present invention provides a method of treating ALSP in a human patient, the method comprising administering to the patient an effective amount of a TREM2 agonist antigen binding protein comprising a light chain comprising the sequence of SEQ ID NO:2777 and a heavy chain comprising the sequence of SEQ ID NO:2778.

[0286] In some embodiments, the TREM2 agonist antigen binding proteins of the invention comprise a light chain consisting of or consisting essentially of the amino acid sequence of SEQ ID NO:334, 337, 339 or 341. In some embodiments, the TREM2 agonist antigen binding proteins of the invention comprise a light chain consisting of or consisting essentially of the amino acid sequence of SEQ ID NO:2768, 2771, 2773, or 2775. In some embodiments, the TREM2 agonist antigen binding proteins of the invention comprise a heavy chain consisting of or consisting essentially of the amino acid sequence of SEQ ID NO:335, 336, 338, 340, or 342. In some embodiments, the TREM2 agonist antigen binding proteins of the invention comprise a heavy chain consisting of or consisting essentially of the amino acid sequence of SEQ ID NO:2769, 2770, 2772, 2774, or 2776. In a specific embodiment, the TREM2 agonist antigen binding proteins of the invention comprise a light chain and a heavy chain, wherein:
[0287] (a) the light chain consisting of or consisting essentially of the amino acid sequence of SEQ ID NO:334 and the heavy chain consisting of or consisting essentially of the amino acid sequence of SEQ ID NO:335;
[0288] (b) the light chain consisting of or consisting essentially of the amino acid sequence of SEQ ID NO:334 and the heavy chain consisting of or consisting essentially of the amino acid sequence of SEQ ID NO:336;
[0289] (c) the light chain consisting of or consisting essentially of the amino acid sequence of SEQ ID NO:337 and the heavy chain consisting of or consisting essentially of the amino acid sequence of SEQ ID NO:338;
[0290] (d) the light chain consisting of or consisting of essentially of the amino acid sequence of SEQ ID NO:339 and the heavy chain consisting of or consisting essentially of the amino acid sequence of SEQ ID NO:340; or
[0291] (e) the light chain consisting of or consisting essentially of the amino acid sequence of SEQ ID NO:341 and the heavy chain consisting of or consisting essentially of the amino acid sequence of SEQ ID NO:342.

[0292] In a specific embodiment, the TREM2 agonist antigen binding proteins of the invention comprise a light chain and a heavy chain, wherein:
[0293] (a) the light chain consisting of or consisting essentially of the amino acid sequence of SEQ ID NO:2768 and the heavy chain consisting of or consisting essentially of the amino acid sequence of SEQ ID NO:2769;
[0294] (b) the light chain consisting of or consisting essentially of the amino acid sequence of SEQ ID NO:2768 and the heavy chain consisting of or consisting essentially of the amino acid sequence of SEQ ID NO:2770;
[0295] (c) the light chain consisting of or consisting essentially of the amino acid sequence of SEQ ID NO:2771 and the heavy chain consisting of or consisting essentially of the amino acid sequence of SEQ ID NO:2772;
[0296] (d) the light chain consisting of or consisting of essentially of the amino acid sequence of SEQ ID NO:2773 and the heavy chain consisting of or consisting essentially of the amino acid sequence of SEQ ID NO:2774;
[0297] (e) the light chain consisting of or consisting essentially of the amino acid sequence of SEQ ID NO:2775 and the heavy chain consisting of or consisting essentially of the amino acid sequence of SEQ ID NO:2776; or
[0298] (f) the light chain consisting of or consisting essentially of the amino acid sequence of SEQ ID NO:2777 and the heavy chain consisting of or consisting essentially of the amino acid sequence of SEQ ID NO:2778.

[0299] Unless indicated otherwise by reference to a specific sequence and in related discussions, the numbering of the amino acid residues in an immunoglobulin heavy chain or light chain is according to Kabat-EU numbering as described in Kabat et al., Sequences of Proteins of Immunological Interest, 5th Ed., US Department of Health and Human Services, NIH publication No. 91-3242, pp 662,680,689 (1991) and Edelman et al., Proc. Natl. Acad. USA, Vol. 63: 78-85 (1969). The Kabat numbering scheme is typically used when referring to the position of an amino acid within the variable regions, whereas the EU numbering scheme is generally used when referring to the position of an amino acid with an immunoglobulin constant region.

[0300] In some embodiments, the TREM2 antigen binding protein comprise an antibody that competes with an antibody comprising CDRL1, CDRL2, CDRL3 or light chain variable region disclosed in TABLES A1, A10, A12, and A14, and a heavy chain variable region disclosed in TABLES A2, A11, A13, and A14. In some embodiments, a suitable assay for detecting competitive binding employs kinetic sensors used with Octet® systems (Pall ForteBio), which measures binding interactions using bio-layer interferometry methodology. One group of antibodies, antibodies 10E3, 13E7, 24F4, 4C5, 4G10, 32E3, and 6E7, competed with each other for binding to human TREM2, indicating that they share the same or similar epitope on human TREM2. Antibodies 16B8, 26A10, 26C10, 26F2, 33B12, and 5E3 compete with each other for TREM2 binding, but does not compete with antibodies in the first group or antibodies 24A10, 24G6, or 25F12, indicating that this second group of antibodies bind to a distinct epitope on human TREM2. Antibodies 24A10 and 24G6 share a similar epitope on human TREM2 as these two antibodies compete with each other for human TREM2 binding, but did not compete with any other antibody. Antibody 25F12 did not compete with any of the other tested antibodies for human TREM2 binding, indicating that this antibody binds to yet another epitope.

[0301] In some embodiments, a TREM2 agonist antigen binding protein competes with a reference antibody for binding to human TREM2, wherein the reference antibody comprises a light chain variable region comprising a sequence selected from SEQ ID NOS:46-63 and a heavy chain variable region comprising a sequence selected from SEQ ID NOS: 110-126. In other embodiments, a TREM2 agonist antigen binding protein of the invention competes with a reference antibody for binding to human TREM2, wherein the reference antibody comprises a light chain variable region comprising a sequence selected from SEQ ID NOS: 153-162 and a heavy chain variable region comprising a sequence selected from SEQ ID NOS: 180-190. In still other embodiments, a TREM2 agonist antigen binding protein of the invention competes with a reference antibody for binding to human TREM2, wherein the reference antibody comprises a light chain variable region comprising a sequence selected from SEQ ID NOS:61 and 295-300 and a heavy chain variable region comprising a sequence selected from SEQ ID NOS: 124 and 307-312. In certain embodiments, a TREM2 agonist antigen binding protein of the invention competes for binding to human TREM2 with one or more of the anti-TREM2 antibodies described herein, including 12G10, 26A10, 26C10, 26F2, 33B12, 24C12, 24G6, 24A10, 10E3, 13E7, 14C12, 25F12, 32E3, 24F4, 16B8, 4C5, 6E7, 5E3, 4G10, V3, V9, V10, V23, V24, V27, V30, V33, V40, V44, V48, V49, V52, V57, V60, V68, V70, V73, V76, V83, V84, and V90.

[0302] In some embodiments, the TREM2 agonist antigen binding protein competes with a reference antibody for binding to human TREM2, wherein the reference antibody comprises a light chain variable region comprising the sequence of SEQ ID NO:61 and a heavy chain variable region comprising the sequence of SEQ ID NO: 124. In such embodiments, antigen binding proteins that compete with this reference antibody for binding to human TREM2 would bind the same or similar epitope as antibody 6E7 or any of the other antibodies 10E3, 13E7, 24F4, 4C5, 4G10, and 32E3.

[0303] In some embodiments, the TREM2 agonist antigen binding protein competes with a reference antibody for binding to human TREM2, wherein the reference antibody comprises a light chain variable region comprising the sequence of SEQ ID NO:62 and a heavy chain variable region comprising the sequence of SEQ ID NO: 125. In such embodiments, antigen binding proteins that compete with this reference antibody for binding to human TREM2 would bind the same or similar epitope as antibody 5E3 or any of the other antibodies 16B8, 26A10, 26C10, 26F2, and 33B12.

[0304] In some embodiments, the TREM2 agonist antigen binding protein competes with a reference antibody for binding to human TREM2, wherein the reference antibody comprises a light chain variable region comprising the sequence of SEQ ID NO:52 and a heavy chain variable region comprising the sequence of SEQ ID NO: 115. In such embodiments, antigen binding proteins that compete with this reference antibody for binding to human TREM2 would bind the same or similar epitope as antibody 24G6 or antibody 24A10.

[0305] In some embodiments, the TREM2 agonist antigen binding protein competes with a reference antibody for binding to human TREM2, wherein the reference antibody comprises a light chain variable region comprising the sequence of SEQ ID NO:56 and a heavy chain variable region comprising the sequence of SEQ ID NO: 119. In such embodiments, antigen binding proteins that compete with this reference antibody for binding to human TREM2 would bind the same or similar epitope as antibody 25F12.

[0306] In some embodiments, isolated nucleic acids encoding the anti-TREM2 binding domain of the antigen binding proteins of the invention can be used to synthesize the antigen binding protein or used to generate variants. In some embodiments, the polynucleotide may comprise a nucleotide sequence that is at least 80% identical, at least 90% identical, at least 95% identical, or at least 98% identical to any of the nucleotide sequences listed in TABLE A15..

TABLE A16
Exemplary Anti-TREM2 Antibody Variable Region Nucleic Acid Sequences

| | | |
|---|---|---|
| | VL or VH | |
| | Group | |
| Ab ID. | Designation | Nucleic Acid Sequence |

Light chain variable regions

| | | |
|---|---|---|
| 12G10 | LV-01 | CAGGCTGTGCCGACTCAGCCGTCTTCCCTCTCTGCATCTCCTGGAGT |
| | | ATTAGCCAGTCTCACCTGCACCTTACGCAGTGGCATCAATGTTGGTA |
| | | CCTACAGGATATACTGGTACCAGCAGAAGCCAGGGAGTCCTCCCCA |
| | | GTATCTCCTGAGGTACAAATCAGACTCAGATAAGCAGCAGGGCTCT |
| | | GGAGTCCCCAGCCGCTTCTCTGGATCCAAGGATGCTTCGGCCAATGC |
| | | AGGGATTTTACTCATCTCTGGGCTCCAGTCTGAGGATGAGGCTGACT |
| | | ATTACTGTATGATTTGGTACAGCAGTGCTGTGGTATTCGGCGGAGGG |
| | | ACCAAACTGACCGTCCTA (SEQ ID NO: 208) |
| 26A10 | LV-02 | TCCTATGAGCTGACTCAGCCACCCTCAGTGTCCGTGTCCCCAGGACA |
| | | GACAGCCAGCATCACCTGCTCTGGAGATAAATTGGGAGATAAGTAT |
| | | GTTTGCTGGTATCAGCAGAAGCCAGGCCAGTCCCCTGTGCTGGTCAT |
| | | CTATCAAGATAGCAAGCGGCCCTCAGGGATCCCTGAGCGATTCTCTG |
| | | GCTCCAACTCTGGGAACACAGCCACTCTGACCATCAGCGGGACCCA |
| | | GGCTATGGATGAGGCTGACTATTACTGTCAGGCGTGGGACAGTAAC |
| | | ACTGTGGTATTCGGCGGAGGGACCAAGCTGACCGTCCTA |
| | | (SEQ ID NO: 209) |
| 26C10 | LV-03 | TCCTTTGAGCTGACTCAGCCACCCTCAGTGTCCGTGTCCCCAGGACA |
| | | GACAGCCAGCATCACCTGCTCTGGAGATAAATTGGGGGATAAGTAT |
| | | GTTTGCTGGTATCAGCAGAAGCCAGGCCAGTCCCCTATGTTGGTCAT |
| | | CTATCAAGATACCAAGCGGCCCTCAGGGATCCCTGAACGATTCTCTG |
| | | GCTCCAACTCTGGGAACACAGCCACTCTGACCATCAGCGGGACCCA |
| | | GGCTATGGATGAGGCTGACTATTACTGTCAGGCGTGGGACAGCAGC |
| | | ACTGTGGTCTTCGGCGGAGGGACCAAGCTGACCGTCCTA |
| | | (SEQ ID NO: 210) |
| 26F2 | LV-04 | TCCTATGAGCTGACTCAGCCACCCTCAGTGTCCGTGTCCCCAGGACA |
| | | GACAGCCAGCATCACCTGCTCTGGAGATAAATTGGGGGATAAGTAT |
| | | GTTTGCTGGTATCAGCAGAAGCCAGGCCAGTCCCCTGTGTTGGTCAT |
| | | CTTTCAAGATAGCAAGCGGCCCTCAGGGATCCCTGAGCGATTCTCTG |
| | | GCTCCAACTCTGGGAACACAGCCACTCTGACCATCAGCGGGACCCA |
| | | GGCTATGGATGAGGCTGACTATTACTGTCAGGCGTGGGACAGCAGC |
| | | ACTGTGGTATTCGGCGGAGGGACCAAGCTGACCGTCCTA |
| | | (SEQ ID NO: 211) |
| 33B12 | LV-05 | TCCTATGAGCTGACTCAGCCACCCTCAGTGTCCGTGTCCCCAGGACA |
| | | GACAGCCAGCATCACCTGCTCTGGAGATAAATTGGGGGATAAGTAT |
| | | GTTTGCTGGTATCAGCAGAAGCCAGGCCAGTCCCCTGTGTTGGTCAT |
| | | CTATCAAGATAGCAAGCGGCCCTCAGGGATCCCTGAGCGATTCTCTG |
| | | GCTCCAACTCTGGGAACACAGCCACTCTGACCATCAGCGGGACCCA |
| | | GGCTATGGATGAGGCTGACTATTACTGTCAGGCGTGGGACAGTAGC |
| | | ACTGTGGTATTCGGCGGAGGGACCAAGCTGACCGTCCTA |
| | | (SEQ ID NO: 212) |
| 24C12 | LV-06 | GGCATCGTGATGACCCAGTCTCCAGACTCCCTGGCTGTGTCTCTGGG |
| | | CGAGAGGGCCACCATCAACTGCAAGTCCAGCCGGAGTGTTTTGTAC |
| | | AGCTCCAACAATAAGAACTACTTAGCTTGGTACCAGCAGAAACCAG |
| | | GACAGCCTCCTAAGGTGCTCATTTACTGGGCATCTACCCGGGAATCC |
| | | GGGGTCCCTGACCGATTCAGTGGCAGCGGGTCTGGGACAGATTTCA |
| | | CTCTCACCATCAGCAGCCTGCAGGCTGAAGATGTGGCAGTTTATAAC |
| | | TGTCAGCAATATTATATTACTCCGATCACCTTCGGCCAAGGGACACG |
| | | ACTGGAGATTAAA (SEQ ID NO: 213) |
| 24G6 | LV-07 | GACATCGTGATGACCCAGTCTCCAGACTCCCTGGCTGTGTCTCTGGG |
| | | CGAGAGGGCCACCATCAACTGCAAGTCCAGCCAGAGTGTTTTATAC |
| | | AGCTCCAACAATAAGCACTTCTTAGCTTGGTACCAGCAGAAACCAG |
| | | GACAGCCTCCTAAGCTGCTCATTTACTGGGCATCTACCCGGGAGTCC |
| | | GGGGTCCCTGACCGATTCAGTGGCAGCGGGTCTGGGACAGATTTCA |
| | | CTCTCACCATCAGCAGCCTGCAGGCTGAAGATGTGGCATTTTATTAC |
| | | TGTCAGCAATATTATAGTACTCCGCTCACTTTCGGCGGAGGGACCAA |
| | | GGTGGAGATCAAA (SEQ ID NO: 214) |
| 24A10 | LV-08 | GACATCGTGATGACCCAGTCTCCAGACTCCCTGGCTGTGTCTCTGGG |
| | | CGAGAGGGCCACCATCACCTGCAAGTCCAGCCACAATGTTTTATACA |
| | | GCTCCAACAATAAGAACTACTTAGCTTGGTATCAGCAGAAACCAGG |
| | | ACAGCCTCCTAAACTGCTCATTTACTGGGCATCTACCCGGGAATCCG |
| | | GGGTCCCTGACCGATTCAGTGGCAGCGGGTCTGGGACAGATTTCACT |
| | | CTCACCATCAGCAGCCTGCAGGCTGAAGATGTGGCAGTTTATTACTG |
| | | TCACCAATATTATAGTACTCCGTGCAGTTTTGGCCAGGGGACCAAGC |
| | | TGGAGATCAAA (SEQ ID NO: 215) |
| 10E3 | LV-09 | GAAATAGTGATGACGCAGTCTCCAGCCACCCTGTCTGTGTCTCCAGG |
| | | GGAAAGAGCCACCCTCTCCTGCAGGGCCAGTCAGAGTGTTAGCAGC |
| | | AACTTAGCCTGGTTCCAGCAGAAACCTGGCCAGGCTCCCAGGCTCCT |
| | | CATCTATGGTGCTTCCACCAGGGCCACTGGTATTCCAGCCAGGTTCA |
| | | GTGTCAGTGGGTCTGGGACAGAGTTCACTCTCACCATCAGCAGCCTG |
| | | CAGTCTGAAGATTTTGCATTTTATTACTGTCTGCAGGATAATAATTG |
| | | GCCTCCCACTTTCGGCCCTGGGACCAAAGTGGATATCAAA |
| | | (SEQ ID NO: 216) |
| 13E7 | LV-10 | GAAATAGTGATGACGCAGTCTCCAGCCACCCTGTCTGTGTCTCCAGG |
| | | GGAAAGAGCCACCCTCTCCTGCAGGGCCAGTCAGAGTGTTAGCAGC |
| | | AACTTAGCCTGGTTCCAGCAGAAACCTGGCCAGGCTCCCAGGCTCCT |
| | | CATCTATGGTGCTTCCACCAGGGCCACTGGTATTCCAGCCAGGTTCA |
| | | GTGTCAGTGGGTCTGGGACAGAGTTCACTCTCACCATCAGCAGCCTG |
| | | CAGTCTGAAGATTTTGCAGTTTATTACTGTCTGCAGGATAATAATTG |
| | | GCCTCCCACTTTCGGCCCTGGGACCAAAGTGGATATCAAA |
| | | (SEQ ID NO: 217) |
| 25F12 | LV-11 | GAAAAAGTGATGACGCAGTCTCCAGCCACCCTGTCTGTGTCTCCAGG |
| | | GGAAAGAGCCACCCTCTCCTGCAGGGCCAGTCAGAGTGTTAACAAC |
| | | AACTTAGCCTGGTACCAGCAGAAACCTGGCCAGGCTCCCAGGCTCCT |
| | | CATCTATGGTGCATCCACCAGGGCCACTGGTATCCCAGCCAGGTTCA |
| | | GTGGCAGTGGGTCTGGGACAGAGTTCACTCTCACCATCAGCAGCCTG |
| | | CAGTCTGAAGATTTTGCAGTTTATTACTGTCAGCAGTATAATAACTG |
| | | GCCTCGGACGTTCGGCCAAGGGACCAAGGTGGAAATCAAA |
| | | (SEQ ID NO: 218) |
| 32E3 | LV-12 | GAATTTGTGTTGACGCAGTCTCCAGGCACCCTGTCTTTGTCTCCGGG |
| | | GGAAAGAGCCACCCTCTCCTGCAGGGCCAGTCAGATTATTAGCAGC |
| | | AACTACTTAGCCTGGTACCAGCAGAAACCTGGCCAGGCTCCCAGGC |
| | | TCCTCATCTATAGTGCATCCAGCAGGGCCACTGGCATCCCAGACAGG |
| | | TTCAGTGGCAGTGGGTCTGGGACAGACTTCACTCTCACCATCAGCAG |
| | | ACTGGAGCCTGAAGATTTTGCAGTGTATTACTGTCAGCAGTTTGATA |
| | | GCTCACCGATCACCTTCGGCCGAGGGACACGACTGGACATTAAA |
| | | (SEQ ID NO: 219) |
| 24F4 | LV-13 | GAAATTGTGTTGACGCAGTCTCCAGGCACCCTGTCTTTGTCTCCAGG |
| | | GGAAAGAGCCACCCTCTCCTGCAGGGCCAGTCAGAGTGTTAGCAGC |
| | | AGCTACTTAGCCTGGTACCAGCAGAAACCTGGCCAGGCTCCCAGGC |
| | | TCCTCATCTATGGTGCATCCAGCAGGGCCACTGGCATCCCAGACAGG |
| | | TTCAGTGGCAGTGGGTCTGGGACAGACTTCACTCTCACCATCAGCAG |
| | | ACTGGAGCCTGAAGATTTTGCACTGTATTACTGTCAGCAGTATGATA |
| | | CCTCACCATTCACTTTCGGCCCTGGGACCAAAGTGGATATCAAA |
| | | (SEQ ID NO: 220) |
| 16B8 | LV-14 | GACATCCAGATGACCCAGTCTCCATCTTCCGTGTCTGCATCTGTAGG |
| | | AGACAGAGTCACCGTCACTTGTCGGGCGAGTCAGGATATTAACAGC |
| | | TGGTTAGCCTGGTATCAGCAGAAACCAGGGAAAGCCCCTAAGCTCC |
| | | TGATCTATGCTGCATCCTCTTTGCAAACTGGGGTCCCTTCAAGGTTC |
| | | AGCGGCAGTGGATCTGGGACAGATTTCACTCTCACCATCAGCAGCCT |
| | | GCAGCCTGAAGATTTTGCAACTTACTCTTGTCAACAGTCTAACAGTT |
| | | TCCCGATCACCTTCGGCCAAGGGACACGACTGGAGATTAAA |
| | | (SEQ ID NO: 221) |
| 4C5 | LV-15 | GACATCCAGATGACCCAGTCTCCATCTTCCGTGTCTGCATCTGTAGG |
| | | AGACAGAGTCACCATCACTTGTCGGGCGAGTCAGGGTATTAGCAAC |
| | | TGGTTAGCCTGGTATCAGCAGAAACCAGGGAAAGCCCCTAAGCTCC |
| | | TGATCTATGCTGCATCCAGTTTGCAAGTTGGGGTCCCATTAAGGTTC |
| | | AGCGGCAGTGGATCTGGGACAGATTTCACTCTCACCATCAGCAGCCT |
| | | GCAGCCTGAAGATTTTGCAACTTACTATTGTCAACAGGCTGACAGTT |
| | | TCCCTCGCAATTTTGGCCAGGGGACCAAGCTGGAGATCAAA |
| | | (SEQ ID NO: 222) |
| 6E7 | LV-16 | GACATCCAGATGACCCAGTCTCCATCTTCCGTGTCTGCATCTGTAGG |
| V9 | | AGACAGAGTCACCATCACTTGTCGGGCGAGTCAGGGTATTAGCAGC |
| V30 | | TGGTTAGCCTGGTATCAGCAGAAACCAGGGAAAGCCCCTAAGCTCC |
| V33 | | TGATCTATGCTGCATCCAGTTTGCAAAATGGGGTCCCATCAAGGTTC |
| V44 | | AGCGGCAGTGGATCTGGGACAGATTTCACTCTCACCATCAGCAGCCT |
| V68 | | GCAGCCTGAAGATTTTGCAACTTACTTTTGTCAACAGGCTGACAGTT |
| | | TCCCTCGCACTTTTGGCCAGGGGACCAAGCTGGAGATCAAA |
| | | (SEQ ID NO: 223) |
| 5E3 | LV-17 | GACATCCAGATGACCCAGTCTCCATCCTCACTGTCTGCATCTGTAGG |
| | | AGACAGAGTCACCATCACTTGTCGGGCGAGTCAGGGCATTAGCAAT |
| | | TATTTAGCCTGGTTTCAGCAGAAACCAGGGAAAGCCCCTAAATCCCT |
| | | GATCTATGCTGCATCCAGTTTGCAAAGTGGGGTCCCATCAAAGTTCA |
| | | GCGGCAGTGGATCTGGGACAGATTTCACTCTCACCATCAGCAGCCTG |
| | | CAGCCTGAAGATTTTGCAACTTATTACTGCCAACAGTATAGTACTTA |
| | | CCCATTCACTTTCGGCCCTGGGACCAAAGTGGATATCAAA |
| | | (SEQ ID NO: 224) |
| 4G10 | LV-18 | GACATCCAGATGACCCAGTCTCCATCCTCCCTGTCTGCATCTGTAGG |
| | | AGACAGAGTCACCATCACTTGCCGGGCAAGTCAGGGCATAAGAAAT |
| | | GATTTAGGCTGGTATCAGCAGAAACCAGGGAATGCCCCTAAGCGCC |
| | | TGATCTATGCTGCATCCAGTTTGCCAAGTGGGGTCCCATCAAGGTTC |
| | | AGCGGCAGTGGATCTGGGCCAGAATTCACTCTCACAATCAGCAGTCT |
| | | GCAGCCTGAAGATTTTGCAACTTATTACTGTCTACAGCATAATAGTT |
| | | ACCCGTGGACGTTCGGCCAAGGGACCAAGGTGGAAATCACA |
| | | (SEQ ID NO: 225) |
| V3 | LV-101 | GACATCCAGATGACCCAGTCTCCATCTTCCGTGTCTGCATCTGTAGG |
| | | AGACAGAGTCACCATCACTTGTCGGGCGAGTCAGGGTATTAGCAGC |
| | | TGGTTAGCCTGGTATCAGCAGAAACCAGGGAAAGCCCCTAAGCTCC |
| | | TGATCTATGCTGCATCCAGTAGGCAAAATGGGGTCCCATCAAGGTTC |
| | | AGCGGCAGTGGATCTGGGACAGATTTCACTCTCACCATCAGCAGCCT |
| | | GCAGCCTGAAGATTTTGCAACTTACTTTTGTCAACAGGCTGACAGGT |
| | | TCCCTCGCACTTTTGGCCAGGGGACCAAGCTGGAGATCAAA |
| | | (SEQ ID NO: 226) |
| V24 | LV-102 | GACATCCAGATGACCCAGTCTCCATCTTCCGTGTCTGCATCTGTAGG |
| | | AGACAGAGTCACCATCACTTGTCGGGCGAGTCAGGGTATTAGCAGC |
| | | TGGTTAGCCTGGTATCAGCAGAAACCAGGGAAAGCCCCTAAGCTCC |
| | | TGATCTATGCTGCATCCAGTTTGCAAAAGGGGGTCCCATCAAGGTTC |
| | | AGCGGCAGTGGATCTGGGACAGATTTCACTCTCACCATCAGCAGCCT |
| | | GCAGCCTGAAGATTTTGCAACTTACTTTTGTCAACAGGCTGACAGTT |
| | | TCCCTCATACTTTTGGCCAGGGGACCAAGCTGGAGATCAAA |
| | | (SEQ ID NO: 227) |
| V27 | LV-103 | GACATCCAGATGACCCAGTCTCCATCTTCCGTGTCTGCATCTGTAGG |
| | | AGACAGAGTCACCATCACTTGTCGGGCGAGTCAGGGTATTAGCAGC |
| | | TGGTTAGCCTGGTATCAGCAGAAACCAGGGAAAGCCCCTAAGCTCC |
| | | TGATCTATGCTGCATCCAGTTTGCAACGTGGGGTCCCATCAAGGTTC |
| | | AGCGGCAGTGGATCTGGGACAGATTTCACTCTCACCATCAGCAGCCT |
| | | GCAGCCTGAAGATTTTGCAACTTACTTTTGTCAACAGGCTGACAGTT |
| | | TCCCTCGCACTTTTGGCCAGGGGACCAAGCTGGAGATCAAA |
| | | (SEQ ID NO: 228) |
| V40 | LV-104 | GACATCCAGATGACCCAGTCTCCATCTTCCGTGTCTGCATCTGTAGG |
| | | AGACAGAGTCACCATCACTTGTCGGGCGAGTCAGGGTATTAGCAGC |
| | | TGGTTAGCCTGGTATCAGCAGAAACCAGGGAAAGCCCCTAAGCTCC |
| | | TGATCTATGCTGCATCCAGTTTGCAACTTGGGGTCCCATCAAGGTTC |
| | | AGCGGCAGTGGATCTGGGACAGATTTCACTCTCACCATCAGCAGCCT |
| | | GCAGCCTGAAGATTTTGCAACTTACTTTTGTCAACAGGCTGACCGTT |
| | | TCCCTCGCACTTTTGGCCAGGGGACCAAGCTGGAGATCAAA |
| | | (SEQ ID NO: 229) |
| V48 | LV-105 | GACATCCAGATGACCCAGTCTCCATCTTCCGTGTCTGCATCTGTAGG |
| | | AGACAGAGTCACCATCACTTGTCGGGCGAGTCAGGGTATTAGCAGC |
| | | TGGTTAGCCTGGTATCAGCAGAAACCAGGGAAAGCCCCTAAGCTCC |
| | | TGATCTATGCTGCATCCAGTTTGCAAACGGGGGTCCCATCAAGGTTC |
| | | AGCGGCAGTGGATCTGGGACAGATTTCACTCTCACCATCAGCAGCCT |
| | | GCAGCCTGAAGATTTTGCAACTTACTTTTGTCAACAGGCTGACAGTT |
| | | TGCCTCGCACTTTTGGCCAGGGGACCAAGCTGGAGATCAAA |
| | | (SEQ ID NO: 230) |
| V49 | LV-106 | GACATCCAGATGACCCAGTCTCCATCTTCCGTGTCTGCATCTGTAGG |
| | | AGACAGAGTCACCATCACTTGTCGGGCGAGTCAGGGTATTAGCAGC |
| | | TGGTTAGCCTGGTATCAGCAGAAACCAGGGAAAGCCCCTAAGCTCC |
| | | TGATCTATGCTGCATCCAGTCGGCAAAATGGGGTCCCATCAAGGTTC |
| | | AGCGGCAGTGGATCTGGGACAGATTTCACTCTCACCATCAGCAGCCT |
| | | GCAGCCTGAAGATTTTGCAACTTACTTTTGTCAACAGGCTGACAGTT |
| | | ATCCTCGCACTTTTGGCCAGGGGACCAAGCTGGAGATCAAA |
| | | (SEQ ID NO: 231) |
| V52 | LV-107 | GACATCCAGATGACCCAGTCTCCATCTTCCGTGTCTGCATCTGTAGG |
| | | AGACAGAGTCACCATCACTTGTCGGGCGAGTCAGGGTATTAGCAGC |
| | | TGGTTAGCCTGGTATCAGCAGAAACCAGGGAAAGCCCCTAAGCTCC |
| | | TGATCTATGCTGCATCCAGTTTGCAAAGGGGGGTCCCATCAAGGTTC |
| | | AGCGGCAGTGGATCTGGGACAGATTTCACTCTCACCATCAGCAGCCT |
| | | GCAGCCTGAAGATTTTGCAACTTACTTTTGTCAACAGGCTGACCGTT |
| | | TCCCTCGCACTTTTGGCCAGGGGACCAAGCTGGAGATCAAA |
| | | (SEQ ID NO: 232) |
| V60 | LV-108 | GACATCCAGATGACCCAGTCTCCATCTTCCGTGTCTGCATCTGTAGG |
| | | AGACAGAGTCACCATCACTTGTCGGGCGAGTCAGGGTATTAGCAGC |
| | | TGGTTAGCCTGGTATCAGCAGAAACCAGGGAAAGCCCCTAAGCTCC |
| | | TGATCTATGCTGCATCCAGTTTGCAAAGGGGGGTCCCATCAAGGTTC |
| | | AGCGGCAGTGGATCTGGGACAGATTTCACTCTCACCATCAGCAGCCT |
| | | GCAGCCTGAAGATTTTGCAACTTACTTTTGTGGGCAGGCTGACAGTT |
| | | TCCCTCGCACTTTTGGCCAGGGGACCAAGCTGGAGATCAAA |
| | | (SEQ ID NO: 233) |
| V73 | LV-106 | GACATCCAGATGACCCAGTCTCCATCTTCCGTGTCTGCATCTGTAGG |
| | | AGACAGAGTCACCATCACTTGTCGGGCGAGTCAGGGTATTAGCAGC |
| | | TGGTTAGCCTGGTATCAGCAGAAACCAGGGAAAGCCCCTAAGCTCC |
| | | TGATCTATGCTGCATCCAGTCGTCAAAATGGGGTCCCATCAAGGTTC |
| | | AGCGGCAGTGGATCTGGGACAGATTTCACTCTCACCATCAGCAGCCT |
| | | GCAGCCTGAAGATTTTGCAACTTACTTTTGTCAACAGGCTGACAGTT |
| | | ATCCTCGCACTTTTGGCCAGGGGACCAAGCTGGAGATCAAA |
| | | (SEQ ID NO: 234) |
| V76 | LV-109 | GACATCCAGATGACCCAGTCTCCATCTTCCGTGTCTGCATCTGTAGG |
| | | AGACAGAGTCACCATCACTTGTCGGGCGAGTCAGGGTATTAGCAGC |
| | | TGGTTAGCCTGGTATCAGCAGAAACCAGGGAAAGCCCCTAAGCTCC |
| | | TGATCTATGCTGCATCCAGTTTGCAAAAGGGGGTCCCATCAAGGTTC |
| | | AGCGGCAGTGGATCTGGGAGAGATTTCACTCTCACCATCAGCAGCCT |
| | | GCAGCCTGAAGATTTTGCAACTTACTTTTGTCAACAGGCTGACAGTT |
| | | TCCCTCGCACTTTTGGCCAGGGGACCAAGCTGGAGATCAAA |
| | | (SEQ ID NO: 235) |
| V84 | LV-110 | GACATCCAGATGACCCAGTCTCCATCTTCCGTGTCTGCATCTGTAGG |
| | | AGACAGAGTCACCATCACTTGTCGGGCGAGTCAGGGTATTAGCAGC |
| | | TGGTTAGCCTGGTATCAGCAGAAACCAGGGAAAGCCCCTAAGCTCC |
| | | TGATCTATGGTGCATCCAGTTTGCAAAATGGGGTCCCATCAAGGTTC |
| | | AGCGGCAGTGGATCTGGGACAGATTTCACTCTCACCATCAGCAGCCT |
| | | GCAGCCTGAAGATTTTGCAACTTACTTTTGTCAACAGGCTGACAGTT |
| | | TCCCGCGCACTTTTGGCCAGGGGACCAAGCTGGAGATCAAA |
| | | (SEQ ID NO: 236) |
| V10 | LV-201 | GACATCCAGATGACCCAGTCTCCATCTTCCGTGTCTGCATCTGTAGG |
| | | AGACAGAGTCACCATCACTTGTCGGGCGAGTCAGGGTATTAGCAGC |
| | | TGGTTAGCCTGGTATCAGCAGAAACCAGGGAAAGCCCCTAAGCTCC |
| | | TGATCTATTCTGCATCCAGTTTGCAAAATGGGGTCCCATCAAGGTTC |
| | | AGCGGCAGTGGATCTGGGACAGATTTCACTCTCACCATCAGCAGCCT |
| | | GCAGCCTGAAGATTTTGCAACTTACTTTTGTCAACAGGCTGACAGTT |
| | | TCCCTCGCACTTTTGGCCAGGGGACCAAGCTGGAGATCAAA |
| | | (SEQ ID NO: 313) |
| V23 | LV-202 | GACATCCAGATGACCCAGTCTCCATCTTCCGTGTCTGCATCTGTAGG |
| | | AGACAGAGTCACCATCACTTGTCGGGCGAGTCAGGGTATTAGCAGC |
| | | TGGTTAGCCTGGTATCAGCAGAAACCAGGGAAAGCCCCTAAGCTCC |
| | | TGATCTATGCTGCATCCAGTTTGCAAAATGGGGTCCCATCAAGGTTC |
| | | AGCGGCAGTGGATCTGGGACAGATTTCACTCTCACCATCAGCAGCCT |
| | | GCAGCCTGAAGATTTTGCAACTTACTTTTGTCAACAGGCTGACAGTT |
| | | TCCCTCTTACTTTTGGCCAGGGGACCAAGCTGGAGATCAAA |
| | | (SEQ ID NO: 314) |
| V57 | LV-203 | GACATCCAGATGACCCAGTCTCCATCTTCCGTGTCTGCATCTGTAGG |
| | | AGACAGAGTCACCATCACTTGTGCGGCGAGTCAGGGTATTAGCAGC |
| | | TGGTTAGCCTGGTATCAGCAGAAACCAGGGAAAGCCCCTAAGCTCC |
| | | TGATCTATGCTGCATCCAGTTTGCAAAATGGGGTCCCATCAAGGTTC |
| | | AGCGGCAGTGGATCTGGGACAGATTTCACTCTCACCATCAGCAGCCT |
| | | GCAGCCTGAAGATTTTGCAACTTACTTTTGTCAACAGGCTGACAGTT |
| | | TCCCTCGCACTTTTGGCCAGGGGACCAAGCTGGAGATCAAA |
| | | (SEQ ID NO: 315) |
| V70 | LV-204 | GACATCCAGATGACCCAGTCTCCATCTTCCGTGTCTGCATCTGTAGG |
| | | AGACAGAGTCACCATCACTTGTCGGGCGAGTCAGGGTATTAGCAGC |
| | | TGGTTAGCCTGGTATCAGCAGAAACCAGGGAAAGCCCCTAAGCTCC |
| | | TGATCTATGCTGCAGGGAGTTTGCAAAATGGGGTCCCATCAAGGTTC |
| | | AGCGGCAGTGGATCTGGGACAGATTTCACTCTCACCATCAGCAGCCT |
| | | GCAGCCTGAAGATTTTGCAACTTACTTTTGTCAACAGGCTGACAGTT |
| | | TCCCTCGCACTTTTGGCCAGGGGACCAAGCTGGAGATCAAA |
| | | (SEQ ID NO: 316) |
| V83 | LV-205 | GACATCCAGATGACCCAGTCTCCATCTTCCGTGTCTGCATCTGTAGG |
| | | AGACAGAGTCACCATCACTTGTCGGGCGAGTCAGGGTATTAGCAGC |
| | | TGGTTAGCCTGGTATCAGCAGAAACCAGGGAAAGCCCCTAAGCTCC |
| | | TGATCTATGCTGCATCCAGTTTGCAAAATGGGGTCCCATCAAGGTTC |
| | | AGCGGCAGTGGATCTGGGACAGATTTCACTCTCACCATCAGCAGCCT |
| | | GCAGCCTGAAGATTTTGCAACTTACTTTTGTCAACAGGCTGTGAGTT |
| | | TCCCTCGCACTTTTGGCCAGGGGACCAAGCTGGAGATCAAA |
| | | (SEQ ID NO: 317) |
| V90 | LV-206 | GACATCCAGATGACCCAGTCTCCATCTTCCGTGTCTGCATCTGTAGG |
| | | AGACAGAGTCACCATCACTTGTCGGGCGAGTCAGGGTATTAGCAGA |
| | | TGGTTAGCCTGGTATCAGCAGAAACCAGGGAAAGCCCCTAAGCTCC |
| | | TGATCTATGCTGCATCCAGTTTGCAAAATGGGGTCCCATCAAGGTTC |
| | | AGCGGCAGTGGATCTGGGACAGATTTCACTCTCACCATCAGCAGCCT |
| | | GCAGCCTGAAGATTTTGCAACTTACTTTTGTCAACAGGCTGACAGTT |
| | | TCCCTCGCACTTTTGGCCAGGGGACCAAGCTGGAGATCAAA |
| | | (SEQ ID NO: 318) |

Heavy chain variable regions

| | | |
|---|---|---|
| 12G10 | HV-01 | GAGGTGCAGCTGTTGGAGTCTGGGGGAGGCTTGGTACAGCCTGGGG |
| 24C12 | | GGTCCCTGAGACTCTCCTGTGCAGCCTCTGGATTCACCTTTAGCAGC |
| | | TATGCCATGAGCTGGGTCCGCCAGGCTCCAGGGAAGGGGCTGGAGT |
| | | GGGTCTCAGCTATTGGTGGTGGTGGTGTTAGCACATACTGCGCAGAC |
| | | TCCGTGAAGGGCCGGTTCACCATCTCCAGAGACAATTCCAAGAATA |
| | | CGCTGTATCTGCAAATGAACAGCCTGAGAGCCGAGGACACGGCCGT |
| | | ATATTACTGTGCGAAATTTTATATAGCAGTGGCTGGTTCTCACTTTG |
| | | ACTACTGGGGCCAGGGAACCCTGGTCACCGTCTCCTCA |
| | | (SEQ ID NO: 237) |
| 26A10 | HV-02 | GAGGTGCAACTGGTGGAGTCTGGGGGAGCCTTGGTACAGCGGGGGG |
| | | GGTCCCTGAGACTCTCCTGTGCAGCCTCTAGATTCACCTTCAGTAGC |
| | | TTTGGCATGAGCTGGGTCCGCCAGGCTCCAGGGAAGGGGCTGGAGT |
| | | GGGTTTCATACATTAGTAGTAGTAGTTTTACCATATATTACGCAGAC |
| | | TCTGTGAAGGGCCGATTCACCATCTCCAGAGACAATGCCAAGAATTC |
| | | ATTCTATCTGCAAATGAACAGCCTGAGAGACGAGGACACGGCTGTG |
| | | TATTACTGTGCGAGAGAGGGGGGTCTTACTATGGTTCGGGGAGTCTC |
| | | TTCCTACGGTTTGGACGTCTGGGGCCAAGGGACCACGGTCACCGTCT |
| | | CCTCA (SEQ ID NO: 238) |
| 26C10 | HV-03 | GAGGTGCAACTGGTGGAGTCTGGGGGAGCCTTGGTACAGCCTGGGG |
| | | GGTCCCTGAGACTCTCCTGTGCAGCCTCTGGATTCACCTTCAGTAGC |
| | | TTTGGCATGAGCTGGGTCCGCCAGGCTCCAGGGAAGGGGCTGGAGT |
| | | GGGTTTCATACATTAGTAGTAGTAGTTTTACCATATACTACGCAGAC |
| | | TCTGTGAAGGGCCGATTCACCATCTCCAGAGACAATGCCAAGAATTC |
| | | GTTCTATCTGCAAATGAACAGCCTGAGAGACGAGGACACGGCTGTG |
| | | TATTTCTGTGTGAGAGAGGGGGGTATAACTATGGTTCGGGGAGTCTC |
| | | TTCCTACGGTATGGACGTCTGGGGCCAAGGGACCACGGTCACCGTCT |
| | | CCTCA (SEQ ID NO: 239) |
| 26F2 | HV-04 | GAGGTGCAACTGGTGGAGTCTGGGGGAGCCTTGGTACAGCCTGGGG |
| | | GGTCCCTGAGACTCTCCTGTGCAGCCTCTGGATTCACCTTCAGTAGC |
| | | TTTGGCATGAGCTGGGTCCGCCAGGCTCCAGGGAAGGGGCTGGAGT |
| | | GGATTTCATACATTAGTAGTAGTAGTTTTACCATATACTACGCAGAC |
| | | TCTGTGAAGGGCCGATTCACCATCTCCAGAGACAATGCCAAGAATTC |
| | | ATTCTATCTGCAAATGAACAGCCTGAGAGACGAGGACACGGCTGTG |
| | | TATTTCTGTGCGAGAGAGGGGGGTATTACTATGGTTCGGGGAGTCTC |
| | | TTCCTACGGTATGGACGTCTGGGGCCAAGGGACCACGGTCACCGTCT |
| | | CCTCA (SEQ ID NO: 240) |
| 33B12 | HV-05 | GAGGTGCAACTGGTGGAGTCTGGGGGAGCCTTGGTACAGCCTGGGG |
| | | GGTCCCTGAGACTCTCCTGTGCAGCCTCTGGATTCACCTTCAGTAGC |
| | | TTTGGCATGAGCTGGGTCCGCCAGGCTCCAGGGAAGGGCCTGGAGT |
| | | GGGTTTCATACATTAGTAAAAGTAGTTTTACCATATACTACGCAGAC |
| | | TCTGTGAAGGGCCGATTCACCATCTCCAGAGACAATGCCAAGAATTC |
| | | ATTCTATCTGCAAATGAACAGCCTGAGAGACGAGGACACGGCTGTG |
| | | TATTACTGTGCGAGAGAGGGGGGTCTTACTATGGTTCGGGGAGTCTC |
| | | TTCCTACGGTTTGGACGTCTGGGGCCAAGGGACCACGGTCACCGTCT |
| | | CCTCA (SEQ ID NO: 241) |
| 24G6 | HV-06 | GAGGTGCAGCTGTTGGAGTCTGGGGGAGGCTTGGTACAGCCTGGGG |
| | | GGTCCCTGAGACTCTCCTGTGCAGCCTCTGGATTCACCTTTAGCAGC |
| | | TATGCCATGAGCTGGGTCCGCCAGGCTCCAGGGAAGGGACTGGAGT |
| | | GGGTCTCAGCTATTAGTGGTAGTGGTGGTAGCACATACTACGCAGAC |
| | | TCCGTGAAGGGCCGGTTCACCATCTCCAGAGACAATTCCAAGAACA |
| | | CGCTGTATCTGCAAATGAACAGCCTGAGAGCCGAGGACACGGCCGT |
| | | ATATTACTGTGCGAAGGCGTATACACCTATGGCATTCTTTGACTACT |
| | | GGGGCCAGGGAACCCTGGTCACCGTCTCCTCA (SEQ ID NO: 242) |
| 24A10 | HV-07 | GAGGTGCAGGTGTTGGAGTCTGGGGGAGGCTTGGTACAGCCTGGGG |
| | | GGTCCCTGAGACTCTCCTGTGCAGCCTCTGGATTCACCTTTAGCAAC |
| | | TATGCCATGAGCTGGGTCCGCCAGGCTCCAGGGAAGGGGCTGGAGT |
| | | GGGTCTCAGCTATTAGTGGTAGTGGTGGTAGCACATACTACGCAGAC |
| | | TCCGTGAAGGGCCGGTTCACCATCTCCAGAGACAATTCCAAGAACA |
| | | CGCTGTATCTGCAAATGAACAGCCTGAGAGCCGAGGACACGGCCGT |
| | | ATATTACTGTGCGAAAGGAGGGTGGGAGCTATTTTACTGGGGCCAG |
| | | GGAACCCTGGTCACCGTCTCCTCA (SEQ ID NO: 243) |
| 10E3 | HV-08 | GAGGTGCAGCTGGTGCAGTCTGGAGCAGAGGTGAAAAAGCCCGGGG |
| | | AGTCTCTGATGATCTCCTGTAAGGGTTCTGGATACAGCTTTACCAAC |
| | | TACTGGATCGGCTGGGTGCGCCAGATGCCCGGGAAAGGCCTGGAGT |
| | | GGATGGGGATCATCTATCCTGGAGACTCTGATACCAGATACAGCCC |
| | | GTCCTTCCAAGGCCAGGTCACCATCTCAGCCGACAAGTCCATCAGCA |
| | | CCGCCTACCTGCAGTGGAGCAGCCTGAAGGCCTCGGACACCGCCAT |
| | | GTATTTCTGTGCGAGACGGAGACAGGGGATCTGGGGTGATGCTCTTG |
| | | ATATCTGGGGCCAAGGGACATTGGTCACCGTCTCTTCA |
| | | (SEQ ID NO: 244) |
| 13E7 | HV-09 | GAGGTGCAGCTGGTGCAGTCTGGAGCAGAGGTGAAAAAGCCCGGGG |
| | | AGTCTCTGATGATCTCCTGTAAGGGTTCTGGATACAGCTTTACCAGC |
| | | TACTGGATCGGCTGGGTGCGCCAGATGCCCGGGAAAGGCCTGGAGT |
| | | GGATGGGGATCATCTATCCTGGAGACTCTGATACCAGATACAGCCC |
| | | GTCCTTCCAAGGCCAGGTCACCATCTCAGCCGACAAGTCCATCAGCA |
| | | CCGCCTACCTGCAGTGGAGCAGCCTGAAGGCCTCGGACACCGCCAT |
| | | GTATTTCTGTGCGAGACGGAGACAGGGGATCTGGGGTGATGCTCTTG |
| | | ATTTCTGGGGCCAAGGGACATTGGTCACCGTCTCTTCA |
| | | (SEQ ID NO: 245) |
| 25F12 | HV-10 | CAGGTGCAGCTACAGCAGTGGGGCGCAGGACTGTTGAAGCCTTCGG |
| | | AGACCCTGTCCCTCACCTGCGCTGTCTATGGTGGGTCCTTCAGTAGT |
| | | TACTACTGGAGCTGGATCCGCCAGCCCCCAGGGAAGGGGCTGGAGT |
| | | GGATTGGGGAAATCAATCATAGTGGAAACACCAACTACAACCCGTC |
| | | CCTCAAGAGTCGAGTCACCATATCAGTAGACACGTCCAAGAACCAG |
| | | TTCTCCCTGAAGCTGAGCTCTGTGACCGCCGCGGACACGGCTGTGTA |
| | | TTACTGTGCGAGAGAGGGGTATTACGATATCTTGACTGGTTATCATG |
| | | ATGCTTTTGATATTTGGGACCAAGGGACAATGGTCACCGTNTTTTCA |
| | | (SEQ ID NO: 246) |
| 32E3 | HV-11 | GAGGTGCAGCTGGTGCAGTCTGGAGCAGAGGTGAAAAAGCCCGGGG |
| | | AGTCTCTGAAGATCTCCTGTAAGGGTTCTGGATACAGCTTTACCAGC |
| | | TACTGGATCGGCTGGGTGCGCCAGATGCCCGGGAAAGGCCTGGAGT |
| | | GGATGGGGATCATCTATCCTGGTGACTCTGATACCAGATACAGCCCG |
| | | TCCTTCCAAGGCCAGGTCACCATCTCAGCCGACAAGTCCATCAGCAC |
| | | CGCCTACCTGCAGTGGAGCACCCTGAAGGCCTCGGACACCGCCATA |
| | | TATTACTGTGCGCGACATGACATTATACCAGCAGCCCCTGGTGCTTT |
| | | TGATATCTGGGGCCAAGGGACAATGGTCACCGTCTCTTCA |
| | | (SEQ ID NO: 247) |
| 24F4 | HV-12 | GAGGTGCAGCTGGTGCAGTCTGGAGCAGAGGTGAAAAAGCCCGGGG |
| | | AGTCTCTGAAGATCTCCTGTAAGGGTTCTGGATACACCTTTACCAGC |
| | | TACTGGATCGGCTGGGTGCGCCAGATGCCCGGGAAAGGCCTGGAGT |
| | | GGATGGGGATCATCTATCCTGGTGACTCTGATACCAGATACAGCCCG |
| | | TCCTTCCAAGGCCAGGTCACCATCTCAGTCGACAAGTCCAGCAGCAC |
| | | CGCCTACCTGCAGTGGAGCAGCCTGAAGGCCTCGGACACCGCCATA |
| | | TATTACTGTACGAGACAGGCCATAGCAGTGACTGGTTTGGGGGGTTT |
| | | CGACCCCTGGGGCCAGGGAACCCTGGTCACCGTCTCCTCA |
| | | (SEQ ID NO: 248) |
| 16B8 | HV-13 | CAGGTTCAGCTGGTGCAGTCTGGAGCTGAGGTGAAGAAGCCTGGGG |
| | | CCTCAGTGAAGGTCTCCTGCAAGGCTTCTGGTTACACCTTTACCAAC |
| | | TATGGTATCAGCTGGGTGCGACAGGCCCCTGGACAAGGGCTTGAGT |
| | | GGATGGGATGGATCAGCGCTTACAATGGTAACACAAACTATGCACA |
| | | GAAGCTCCAGGGCAGAGTCACCATGACCACAGACACATCCACGAGT |
| | | ACAGTCTACATGGAGCTGAGGAGCCTGAGATCTGACGACACGGCCG |
| | | TGTATTACTGTGCGAGACGGGGATACAGCTATGGTTCCTTTGACTAC |
| | | TGGGGCCAGGGAACCCTGGTCACCGTCTCCTCA (SEQ ID NO: 249) |
| 4C5 | HV-14 | GAGGTGCAGCTGGTGCAGTCTGGAGCAGAAGTGAAAAAGCCCGGGG |
| | | AGTCTCTGAAGATCTCCTGTAAGGGTTCTGGACACAGTTTTACCAAC |
| | | TACTGGATCGCCTGGGTGCGCCAGATGCCCGGGAAAGGCCTGGAGT |
| | | GGATGGGGATCATCTATCCTGGTGACTCTGATACCAGATACAGCCCG |
| | | TCCTTCCAAGGCCAGGTCACCATCTCAGCCGACAAGTCCATCAGCAC |
| | | CGCCTACCTGCAGTGGAGCAGCCTGAAGGCCTCGGACACCGCCGTG |
| | | TATTTCTGTGCGAGACAAAGGACGTTTTACTATGATAGTAGTGGTTA |
| | | TTTTGACTACTGGGGCCAGGGAACCCTGGTCACCGTCTCCTCA |
| | | (SEQ ID NO: 250) |
| 6E7 | HV-15 | GAGGTGCAGCTGGTGCAGTCTGGAGCAGAGGTGAAAAAGCCCGGGG |
| | | AGTCTCTGAAGATCTCCTGTAAGGGTTCTGGATACAGTTTTACCAGC |
| | | TACTGGATCGCCTGGGTGCGCCAGATGCCCGGGAAAGGCCTGGAGT |
| | | GGATGGGGATCATCTATCCTGGTGACTCTGATACCAGATACAGCCCG |
| | | TCCTTCCAAGGCCAGGTCACCATCTCAGCCGACAAGTCCATCAGCAC |
| | | CGCCTACCTACAGTGGAGCAGCCTGAAGGCCTCGGACACCGCCATG |
| | | TATTTCTGTGCGAGACAAAGGACGTTTTATTATGATAGTAGTGATTA |
| | | TTTTGACTACTGGGGCCAGGGAACCCTGGTCACCGTCTCCTCA |
| | | (SEQ ID NO: 251) |
| 5E3 | HV-16 | CAGGTGCAGCTGGTGCAGTCTGGGGCTGAGGTGAAGAAGCCTGGGG |
| | | CCTCAGTGAAGGTCTCCTGCAAGGCTTCTGGATACACCTTCACCGGC |
| | | TACTATATACACTGGGTGCGACAGGCCCCTGGACTAGGGCTTGAGTG |
| | | GATGGGATGGATCAACCCTTACAGTGGTGGCACAACCTCTGCACAG |
| | | AAGTTTCAGGGCAGGGTCACCATGACCAGGGACACGTCCATCAGCT |
| | | CAGCCTACATGGAACTGAGCAGGCTGAGATCTGACGACACGGCCGT |
| | | GTATTACTGTGCGAGAGATGGAGGCTACCTGGCCCTCTACGGTACGG |
| | | ACGTCTGGGGCCAAGGGACCACGGTCACCGTCTCCTCA |
| | | (SEQ ID NO: 252) |
| 4G10 | HV-17 | GAGGTGCAGCTGGTGCAGTCTGGAGCAGAGGTGAAAAAGCCCGGGG |
| | | AGTCTCTGAAGATCTCCTGTAAGGGTTCTGGATACAGCTTTCCCAGC |
| | | TACTGGATCGCCTGGGTGCGCCAGATGCCCGGGAAAGGCCTGGAGT |
| | | GGATGGGGATCATCTATCCTGGTGACTCTGATACCAGATACAGCCCG |
| | | TCCTTCCAAGGCCAGGTCACCATCTCAGCCGACAAGTCCATCAGCAC |
| | | CGCCTTTTTGAAGTGGAGTAGCCTGAAGGCCTCGGACACCGCCATGT |
| | | ATTTCTGTGCGCGACAGGGTATAGAAGTGACTGGTACGGGAGGTTT |
| | | GGACGTCTGGGGCCAAGGGACCACGGTCACCGTCTCCTCA |
| | | (SEQ ID NO: 253) |
| V3 | HV-101 | GAGGTGCAGCTGGTGCAGTCTGGAGCAGAGGTGAAAAAGCCCGGGG |
| | | AGTCTCTGAAGATCTCCTGTAAGGGTTCTGGATACAGTTTTGCGAGC |
| | | TACTGGATCGCCTGGGTGCGCCAGATGCCCGGGAAAGGCCTGGAGT |
| | | GGATGGGGATCATCTATCCTGGTGACTCTGATACCAGATACAGCCCG |
| | | TCCTTCCAAGATCAGGTCACCATCTCAGCCGACAAGTCCATCAGCAC |
| | | CGCCTACCTACAGTGGAGCAGCCTGAAGGCCTCGGACACCGCCATG |
| | | TATTTCTGTGCGAGAGGGAGGACGTTTTATTATGATAGTAGTGATTA |
| | | TTTTGACTACTGGGGCCAGGGAACCCTGGTCACCGTGTCCTCA |
| | | (SEQ ID NO: 254) |
| V24 | HV-102 | GAGGTGCAGCTGGTGCAGTCTGGAGCAGAGGTGAAAAAGCCCGGGG |
| | | AGTCTCTGAAGATCTCCTGTAAGGGTTCTGGATACAGTTTTACCAGC |
| | | TACTGGATTGCCTGGGTGCGCCAGATGCCCGGGAAAGGCCTGGAGT |
| | | GGATGGGGATCATCTATCCTGGTGACTCTGATGTGAGATACAGCCCG |
| | | TCCTTCCAAGGCCAGGTCACCATCTCAGCCGACAAGTCCATCAGCAC |
| | | CGCCTACCTACAGTGGAGCAGCCTGAAGGCCTCGGACACCGCCATG |
| | | TATTTCTGTGCGAGATCTAGGACGTTTTATTATGATAGTAGTGATTAT |
| | | TTTGACTACTGGGGCCAGGGAACCCTGGTCACCGTGTCCTCA |
| | | (SEQ ID NO: 255) |
| V27 | HV-103 | GAGGTGCAGCTGGTGCAGTCTGGAGCAGAGGTGAAAAAGCCCGGGG |
| | | AGTCTCTGAAGATCTCCTGTAAGGGTTCTGGATACAGTTTTACCAGC |
| | | TACTGGATCGCCTGGGTGCGCCAGATGCCCGGGAAAGGCCTGGAGT |
| | | GGATGGGGATCATCTATCCTGGTGACTCTGATACCAGATACGCTCCG |
| | | TCCTTCCAAGGCCAGGTCACCATCTCAGCCGACAAGTCCATCAGCAC |
| | | CGCCTACCTACAGTGGAGCAGCCTGAAGGCCTCGGACACCGCCATG |
| | | TATTTCTGTGTGAGAAGTAGGACGTTTTATTATGATAGTAGTGATTA |
| | | TTTTGACTACTGGGGCCAGGGAACCCTGGTCACCGTGTCCTCA |
| | | (SEQ ID NO: 256) |
| V40 | HV-104 | GAGGTGCAGCTGGTGCAGTCTGGAGCAGAGGTGAAAAAGCCCGGGG |
| | | AGTCTCTGAAGATCTCCTGTAAGGGTTCTGGATACAGTTTTGGGAGC |
| | | TACTGGATCGCCTGGGTGCGCCAGATGCCCGGGAAAGGCCTGGAGT |
| | | GGATGGGGATCATCTATCCTGGTGACTCTGATGTTAGATACAGCCCG |
| | | TCCTTCCAAGGCCAGGTCACCATCTCAGCCGACAAGTCCATCAGCAC |
| | | CGCCTACCTACAGTGGAGCAGCCTGAAGGCCTCGGACACCGCCATG |
| | | TATTTCTGTGCGAGACAAAGGACGTTTTATTATGATAGTAGTGATTA |
| | | TTCGGACTACTGGGGCCAGGGAACCCTGGTCACCGTGTCCTCA |
| | | (SEQ ID NO: 257) |
| V48 | HV-105 | GAGGTGCAGCTGGTGCAGTCTGGAGCAGAGGTGAAAAAGCCCGGGG |
| | | AGTCTCTGAAGATCTCCTGTAAGGGTTCTGGATACAGTTTTGGTAGC |
| | | TACTGGATCGCCTGGGTGCGCCAGATGCCCGGGAAAGGCCTGGAGT |
| | | GGATGGGGATCATCTATCCTGGTGACTCTGATGTGAGATACAGCCCG |
| | | TCCTTCCAAGGCCAGGTCACCATCTCAGCCGACAAGTCCATCAGCAC |
| | | CGCCTACCTACAGTGGAGCAGCCTGAAGGCCTCGGACACCGCCATG |
| | | TATTTCTGTGCGAGAATGAGGACGTTTTATTATGATAGTAGTGATTA |
| | | TTTTGACTACTGGGGCCAGGGAACCCTGGTCACCGTGTCCTCA |
| | | (SEQ ID NO: 258) |
| V49 | HV-106 | GAGGTGCAGCTGGTGCAGTCTGGAGCAGAGGTGAAAAAGCCCGGGG |
| | | AGTCTCTGAAGATCTCCTGTAAGGGTTCTGGATACAGTTTTAATAGC |
| | | TACTGGATCGCCTGGGTGCGCCAGATGCCCGGGAAAGGCCTGGAGT |
| | | GGATGGGGACGATCTATCCTGGTGACTCTGATACCAGACTGAGCCC |
| | | GTCCTTCCAAGGCCAGGTCACCATCTCAGCCGACAAGTCCATCAGCA |
| | | CCGCCTACCTACAGTGGAGCAGCCTGAAGGCCTCGGACACCGCCAT |
| | | GTATTTCTGTGCGAGAAGTAGGACGTTTTATTATGATAGTAGTGATT |
| | | ATTTTGACTACTGGGGCCAGGGAACCCTGGTCACCGTGTCCTCA |
| | | (SEQ ID NO: 259) |
| V52 | HV-107 | GAGGTGCAGCTGGTGCAGTCTGGAGCAGAGGTGAAAAAGCCCGGGG |
| | | AGTCTCTGAAGATCTCCTGTAAGGGTTCTGGATACAGTTTTGAGAGC |
| | | TACTGGATCGCCTGGGTGCGCCAGATGCCCGGGAAAGGCCTGGAGT |
| | | GGATGGGGATCATCTATCCTGGTGACTCTGATACCAGATACAGCCCG |
| | | TCCTTCCAAGGCCAGGTCACCATCTCAGCCGACAAGTCCATCAGCAC |
| | | CGCCTACCTACAGTGGAGCAGCCTGAAGGCCTCGGACACCGCCATG |
| | | TATTTCTGTGCGAGAGGGAGGACGTTTTATTATGATAGTAGTGATTA |
| | | TTTTGACTACTGGGGCCAGGGAACCCTGGTCACCGTGTCCTCA |
| | | (SEQ ID NO: 260) |
| V60 | HV-108 | GAGGTGCAGCTGGTGCAGTCTGGAGCAGAGGTGAAAAAGCCCGGGG |
| | | AGTCTCTGAAGATCTCCTGTAAGGGTTCTGGATACCATTTTACCAGC |
| | | TACTGGATCGCCTGGGTGCGCCAGATGCCCGGGAAAGGCCTGGAGT |
| | | GGATGGGGATCATCTATCCTGGTGACTCTGATGTGAGATACAGCCCG |
| | | TCCTTCCAAGGCCAGGTCACCATCTCAGCCGACAAGTCCATCAGCAC |
| | | CGCCTACCTACAGTGGAGCAGCCTGAAGGCCTCGGACACCGCCATG |
| | | TATTTCTGTGCGAGACAAAGGACGTTTTATTATGATAGTAGTGATTA |
| | | TAGTGACTACTGGGGCCAGGGAACCCTGGTCACCGTGTCCTCA |
| | | (SEQ ID NO: 261) |
| V73 | HV-109 | GAGGTGCAGCTGGTGCAGTCTGGAGCAGAGGTGAAAAAGCCCGGGG |
| | | AGTCTCTGAAGATCTCCTGTAAGGGTTCTGGATACAGTTTTGGTAGC |
| | | TACTGGATCGCCTGGGTGCGCCAGATGCCCGGGAAAGGCCTGGAGT |
| | | GGATGGGGATCATCTATCCTGGTGACTCTGATACCAGATACAGCCCG |
| | | GGGTTCCAAGGCCAGGTCACCATCTCAGCCGACAAGTCCATCAGCA |
| | | CCGCCTACCTACAGTGGAGCAGCCTGAAGGCCTCGGACACCGCCAT |
| | | GTATTTCTGTGCGAGAGGGAGGACGTTTTATTATGATAGTAGTGATT |
| | | ATTTTGACTACTGGGGCCAGGGAACCCTGGTCACCGTGTCCTCA |
| | | (SEQ ID NO: 262) |
| V76 | HV-110 | GAGGTGCAGCTGGTGCAGTCTGGAGCAGAGGTGAAAAAGCCCGGGG |
| | | AGTCTCTGAAGATCTCCTGTAAGGGTTCTGGATACAGTTTTGGGAGC |
| | | TACTGGATCGCCTGGGTGCGCCAGATGCCCGGGAAAGGCCTGGAGT |
| | | GGATGGGGATCATCTATCCTGGTGACTCTGATACCAGATACAGCCCG |
| | | GAGTTCCAAGGCCAGGTCACCATCTCAGCCGACAAGTCCATCAGCA |
| | | CCGCCTACCTACAGTGGAGCAGCCTGAAGGCCTCGGACACCGCCAT |
| | | GTATTTCTGTGCGAGACAAAGGACGTTTTATTATGATAGTAGTGATT |
| | | ATAGTGACTACTGGGGCCAGGGAACCCTGGTCACCGTGTCCTCA |
| | | (SEQ ID NO: 263) |
| V84 | HV-111 | GAGGTGCAGCTGGTGCAGTCTGGAGCAGAGGTGAAAAAGCCCGGGG |
| | | AGTCTCTGAAGATCTCCTGTAAGGGTTCTGGATACGGGTTTACCAGC |
| | | TACTGGATCGCCTGGGTGCGCCAGATGCCCGGGAAAGGCCTGGAGT |
| | | GGATGGGGATCATCTATCCTGGTGACAGTGATACCAGATACAGCCC |
| | | GTCCTTCCAAGGCCAGGTCACCATCTCAGCCGACAAGTCCATCAGCA |
| | | CCGCCTACCTACAGTGGAGCAGCCTGAAGGCCTCGGACACCGCCAT |
| | | GTATTTCTGTGCGAGACAAAGGACGTTTTATTATGATAGTAGTGATT |
| | | ATTCGGACTACTGGGGCCAGGGAACCCTGGTCACCGTGTCCTCA |
| | | (SEQ ID NO: 264) |
| V9 | HV-201 | GAGGTGCAGCTGGTGCAGTCTGGAGCAGAGGTGAAAAAGCCCGGGG |
| | | AGTCTCTGAAGATCTCCTGTAAGGGTTCTGGATACAGTTTTACCAGC |
| | | TACTGGATCGCCTGGGTGCGCCAGATGCCCGGGAAAGGCCTGGAGT |
| | | GGATGGGGATCATCTATCCTGGTGACTCTGATACCAGATACAGCCCG |
| | | TCCTTCCAAGGCCAGGTCACCATCTCAGCCGACAAGTCCATCAGCAC |
| | | CGCCTACCTACAGTGGAGCAGCCTGAAGGCCTCGGACACCGCCATG |
| | | TATTTCTGTGCGAGACAAAGGGGGTTTTATTATGATAGTAGTGATTA |
| | | TTTTGACTACTGGGGCCAGGGAACCCTGGTCACCGTGTCCTCA |
| | | (SEQ ID NO: 319) |
| V10 | HV-15 | GAGGTGCAGCTGGTGCAGTCTGGAGCAGAGGTGAAAAAGCCCGGGG |
| V23 | | AGTCTCTGAAGATCTCCTGTAAGGGTTCTGGATACAGTTTTACCAGC |
| V57 | | TACTGGATCGCCTGGGTGCGCCAGATGCCCGGGAAAGGCCTGGAGT |
| V70 | | GGATGGGGATCATCTATCCTGGTGACTCTGATACCAGATACAGCCCG |
| V83 | | TCCTTCCAAGGCCAGGTCACCATCTCAGCCGACAAGTCCATCAGCAC |
| | | CGCCTACCTACAGTGGAGCAGCCTGAAGGCCTCGGACACCGCCATG |
| | | TATTTCTGTGCGAGACAAAGGACGTTTTATTATGATAGTAGTGATTA |
| | | TTTTGACTACTGGGGCCAGGGAACCCTGGTCACCGTGTCCTCA |
| | | (SEQ ID NO: 320) |
| V30 | HV-202 | GAGGTGCAGCTGGTGCAGTCTGGAGCAGAGGTGAAAAAGCCCGGGG |
| | | AGTCTCTGAAGATCTCCTGTAAGGGTTCTGGATCGAGTTTTACCAGC |
| | | TACTGGATCGCCTGGGTGCGCCAGATGCCCGGGAAAGGCCTGGAGT |
| | | GGATGGGGATCATCTATCCTGGTGACTCTGATACCAGATACAGCCCG |
| | | TCCTTCCAAGGCCAGGTCACCATCTCAGCCGACAAGTCCATCAGCAC |
| | | CGCCTACCTACAGTGGAGCAGCCTGAAGGCCTCGGACACCGCCATG |
| | | TATTTCTGTGCGAGACAAAGGACGTTTTATTATGATAGTAGTGATTA |
| | | TTTTGACTACTGGGGCCAGGGAACCCTGGTCACCGTGTCCTCA |
| | | (SEQ ID NO: 321) |
| V33 | HV-203 | GAGGTGCAGCTGGTGCAGTCTGGAGCAGAGGTGAAAAAGCCCGGGG |
| | | AGTCTCTGAAGATCTCCTGTAAGGGTTCTGGATACAGTTTTACCAGC |
| | | TACTGGATCGCCTGGGTGCGCCAGATGCCCGGGAAAGGCCTGGAGT |
| | | GGATGGGGATCATCTATCCTGGTGACTCTGATACCAGATACAGCCCG |
| | | TCCTTCCAAGGCCAGGTCACCATCTCAGCCGACAAGTCCATCAGCAC |
| | | CGCCTACCTACAGTGGAGCAGCCTGAAGGCCTCGGACACCGCCATG |
| | | TATTTCTGTGCGAGACAAAGGACGTTTTATGGGGATAGTAGTGATTA |
| | | TTTTGACTACTGGGGCCAGGGAACCCTGGTCACCGTGTCCTCA |
| | | (SEQ ID NO: 322) |
| V44 | HV-204 | GAGGTGCAGCTGGTGCAGTCTGGAGCAGAGGTGAAAAAGCCCGGGG |
| | | AGTCTCTGAAGATCTCCTGTAAGGGTTCTGGATACAGTTTTACCAGC |
| | | TACTGGATCGCCTGGGTGCGCCAGATGCCCGGGAAAGGCCTGGAGT |
| | | GGATGGGGATCATCTATCCTAGTGACTCTGATACCAGATACAGCCCG |
| | | TCCTTCCAAGGCCAGGTCACCATCTCAGCCGACAAGTCCATCAGCAC |
| | | CGCCTACCTACAGTGGAGCAGCCTGAAGGCCTCGGACACCGCCATG |
| | | TATTTCTGTGCGAGACAAAGGACGTTTTATTATGATAGTAGTGATTA |
| | | TTTTGACTACTGGGGCCAGGGAACCCTGGTCACCGTGTCCTCA |
| | | (SEQ ID NO: 323) |
| V68 | HV-205 | GAGGTGCAGCTGGTGCAGTCTGGAGCAGAGGTGAAAAAGCCCGGGG |
| | | AGTCTCTGAAGATCTCCTGTAAGGGTTCTGGATACAGTTTTACCAGC |
| | | TACTGGATCGCCTGGGTGCGCCAGATGCCCGGGAAAGGCCTGGAGT |
| | | GGATGGGGATCATCTATCCTGGTGACTCTGATACCAGATACAGCCCG |
| | | TCCTTCCAAGGCCAGGTCACCATCTCAGCCGACAAGTCCATCAGCAC |
| | | CGCCTACCTACAGTGGAGCAGCCTGAAGGCCTCGGACACCGCCATG |
| | | TATTTCTGTGCGAGACAAAGGACGTTTAGGTATGATAGTAGTGATTA |
| | | TTTTGACTACTGGGGCCAGGGAACCCTGGTCACCGTGTCCTCA |
| | | (SEQ ID NO: 324) |
| V90 | HV-206 | GAGGTGCAGCTGGTGCAGTCTGGAGCAGAGGTGAAAAAGCCCGGGG |
| | | AGTCTCTGAAGATCTCCTGTAAGGGTTCTGGATACAGTTTTACCAGC |
| | | GAGTGGATCGCCTGGGTGCGCCAGATGCCCGGGAAAGGCCTGGAGT |
| | | GGATGGGGATCATCTATCCTGGTGACTCTGATACCAGATACAGCCCG |
| | | TCCTTCCAAGGCCAGGTCACCATCTCAGCCGACAAGTCCATCAGCAC |
| | | CGCCTACCTACAGTGGAGCAGCCTGAAGGCCTCGGACACCGCCATG |
| | | TATTTCTGTGCGAGACAAAGGACGTTTTATTATGATAGTAGTGATTA |
| | | TTTTGACTACTGGGGCCAGGGAACCCTGGTCACCGTGTCCTCA |
| | | (SEQ ID NO: 325) |

[0307] In some embodiments, an isolated nucleic acid encoding an anti-TREM2 antibody light chain variable region comprises a sequence that is at least 80% identical, at least 90% identical, at least 95% o identical, or at least 98% o identical to a sequence selected from SEQ ID NOS:208-236 and 313-318. In certain embodiments, an isolated nucleic acid encoding an anti-TREM2 antibody light chain variable region comprises a sequence selected from SEQ ID NOS:208-236 and 313-318. In related embodiments, an isolated nucleic acid encoding an anti-TREM2 antibody heavy chain variable region comprises a sequence that is at least 80% o identical, at least 90% o identical, at least 95% o identical, or at least 98% o identical to a sequence selected from SEQ ID NOS:237-264 and 319-325. In other related embodiments, an isolated nucleic acid encoding an anti-TREM2 antibody heavy chain variable region comprises a sequence selected from SEQ ID NOS:237-264 and 319-325.

[0308] In some embodiments, the polynucleotide encodes the full length light chain and full length heavy chain. Exemplary polynucleotide sequences are provided in TABLE A15.

B. U.S. Pat. No. 8,231,878

[0309] In some embodiments, the TREM2 agonist is antibody, or an antigen-binding fragment thereof, as described in U.S. Pat. No. 8,231,878, which is incorporated by reference herein, in its entirety. In some embodiments, the TREM2 antibody is monoclonal antibody 29E3, or a fragment, homologue, derivative or variant thereof.

[0310] In some embodiments, the TREM2 antigen bind protein comprises a CDRL1, CDRL2, and CDRL3 of the light chain variable region, and a CDRH1, CDRH2, and CDRH3 of the heavy chain variable region of monoclonal antibody 29E3. Monoclonal antibody 29E3 is further described in Bouchon et al., J Exp Med., 2001, 194(8):1111-1122.

[0311] In some embodiments, the TREM2 antigen bind protein comprises a light chain variable region and a heavy chain variable region of monoclonal antibody 29E3.

[0312] In some embodiments, the TREM2 antigen bind protein is a chimeric antibody containing the light chain variable region and the heavy chain variable region of monoclonal antibody 29E3, and a human heavy chain constant region, such as a human Fc region, or an engineered variant thereof.

[0313] In some embodiments, the TREM2 antigen bind protein, e.g., a TREM2 antibody, competes with binding of monoclonal antibody 29E3 to TREM2.

C. U.S. Patent Application Publication No. US2019/0010230A1

[0314] In some embodiments, the TREM2 agonist is an antibody, or an antigen-binding fragment thereof, as described in U.S. Patent Application Publication No. US2019/0010230A1 (“the '230 application”), which is incorporated by reference herein, in its entirety.

[0315] In some embodiments, the TREM2 binding agent comprises an antibody that comprises a light chain variable domain comprising a CDRL1, CDRL2, and CDRL3 (also referred to as HVR-L1, HVR-L2, and HVR-L3, respectively), and a heavy chain variable domain comprising a CDRH1, CDRH2, and CDRH3 (also referred to as HVR-H1, HVR-H2, and HVR-H3, respectively) disclosed in the '230 application specification. In some embodiments, the TREM2 binding agent comprises an antibody that comprises a light chain variable domain and a heavy chain variable domain disclosed in the '230 application specification.

[0316] In some embodiments, the antibody comprises a heavy chain variable domain and a light chain variable domain, wherein the heavy chain variable domain comprises the HVR-H1, HVR-H2, and/or HVR-H3 of the monoclonal antibody Ab52; and/or wherein the light chain variable domain comprises the HVR-L1, HVR-L2, and/orHVR-L3 of the monoclonal antibody Ab52. In some embodiments, the HVR-H1 comprises the amino acid sequence of SEQ ID NO:772. In some embodiments, the HVR-H2 comprises the amino acid sequence of SEQ ID NO:773. In some embodiments, the HVR-H3 comprises the amino acid sequence of SEQ ID NO:774. In some embodiments, the HVR-L1 comprises the amino acid sequence of SEQ ID NO:775. In some embodiments, the HVR-L2 comprises the amino acid sequence of SEQ ID NO:776. In some embodiments, the HVR-L3 comprises the amino acid sequence of SEQ ID NO:777. In some embodiments, the antibody comprises a heavy chain variable domain and a light chain variable domain, wherein the heavy chain variable domain comprises: (a) an HVR-H1 comprising the amino acid sequence of SEQ ID NO:772, or an amino acid sequence with at least about 95% homology to the amino acid sequence of SEQ ID NO:772; (b) an HVR-H2 comprising the amino acid sequence of SEQ ID NO:773, or an amino acid sequence with at least about 95% homology to the amino acid sequence of SEQ ID NO:773; and; and/or (c) an HVR-H3 comprising the amino acid sequence of SEQ ID NO:774, or an amino acid sequence with at least about 95% homology to the amino acid sequence of SEQ ID NO:774; and/or wherein the light chain variable domain comprises: (a) an HVR-L1 comprising the amino acid sequence of SEQ ID NO:775, or an amino acid sequence with at least about 95% homology to the amino acid sequence of SEQ ID NO:775; (b) an HVR-L2 comprising the amino acid sequence of SEQ ID NO:776, or an amino acid sequence with at least about 95% homology to the amino acid sequence of SEQ ID NO:776; and/or (c) an HVR-L3 comprising the amino acid sequence of SEQ ID NO:777, or an amino acid sequence with at least about 95% homology to the amino acid sequence of SEQ ID NO:777. In some embodiments, the antibody comprises a heavy chain variable domain and a light chain variable domain, wherein the heavy chain variable domain comprises the HVR-H1, HVR-H2, and/or HVR-H3 of the monoclonal antibody Ab21; and/or wherein the light chain variable domain comprises the HVR-L1, HVR-L2, and/or HVR-L3 of the monoclonal antibody Ab21. In some embodiments, the HVR-H1 comprises the amino acid sequence of SEQ ID NO:778. In some embodiments, the HVR-H2 comprises the amino acid sequence of SEQ ID NO:779. In some embodiments, the HVR-H3 comprises the amino acid sequence of SEQ ID NO:780. In some embodiments, the HVR-L1 comprises the amino acid sequence of SEQ ID NO:781. In some embodiments, the HVR-L2 comprises the amino acid sequence of SEQ ID NO:782. In some embodiments, the HVR-L3 comprises the amino acid sequence of SEQ ID NO:783. In some embodiments, the antibody comprises a heavy chain variable domain and a light chain variable domain, wherein the heavy chain variable domain comprises: (a) an HVR-H1 comprising the amino acid sequence of SEQ ID NO:778, or an amino acid sequence with at least about 95% homology to the amino acid sequence of SEQ ID NO:778; (b) an HVR-H2 comprising the amino acid sequence of SEQ ID NO:779, or an amino acid sequence with at least about 95% homology to the amino acid sequence of SEQ ID NO:779; and/or (c) an HVR-H3 comprising the amino acid sequence of SEQ ID NO:780, or an amino acid sequence with at least about 95% homology to the amino acid sequence of SEQ ID NO:780, and/or wherein the light chain variable domain comprises: (a) an HVR-L1 comprising the amino acid sequence of SEQ ID NO:781, or an amino acid sequence with at least about 95% homology to the amino acid sequence of SEQ ID NO:781; (b) an HVR-L2 comprising the amino acid sequence of SEQ ID NO:782, or an amino acid sequence with at least about 95% homology to the amino acid sequence of SEQ ID NO:782; and/or (c) an HVR-L3 comprising the amino acid sequence of SEQ ID NO:783, or an amino acid sequence with at least about 95% homology to the amino acid sequence of SEQ ID NO:783.

[0317] In some embodiments, the heavy chain variable domain comprises the HVR-H1, HVR-H2, and/or HVR-H3 of the monoclonal antibody Ab52; and/or wherein the light chain variable domain comprises the HVR-L1, HVR-L2, and/or HVR-L3 of the monoclonal antibody Ab52. In some embodiments, the HVR-H1 comprises the amino acid sequence of SEQ ID NO:772. In some embodiments, the HVR-H2 comprises the amino acid sequence of SEQ ID NO:773. In some embodiments, the HVR-H3 comprises the amino acid sequence of SEQ ID NO:774. In some embodiments, the HVR-L1 comprises the amino acid sequence of SEQ ID NO:775. In some embodiments, the HVR-L2 comprises the amino acid sequence of SEQ ID NO:776. In some embodiments, the HVR-L3 comprises the amino acid sequence of SEQ ID NO:777. In some embodiments, the antibody comprises a heavy chain variable domain and a light chain variable domain, wherein the heavy chain variable domain comprises an HVR-H1 comprising the amino acid sequence of SEQ ID NO:772, an HVR-H2 comprising the amino acid sequence of SEQ ID NO:773, and an HVR-H3 comprising the amino acid sequence of SEQ ID NO:774, and/or wherein the light chain variable domain comprises an HVR-L1 comprising the amino acid sequence of SEQ ID NO:775, an HVR-L2 comprising the amino acid sequence of SEQ ID NO:776, and an HVR-L3 comprising the amino acid sequence of SEQ ID NO:777.

[0318] In some embodiments, the heavy chain variable domain comprises: (a) an HVR-H1 comprising the amino acid sequence of SEQ ID NO:772, or an amino acid sequence with at least about 95% homology to the amino acid sequence of SEQ ID NO:772; (b) an HVR-H2 comprising the amino acid sequence of SEQ ID NO:773, or an amino acid sequence with at least about 95% homology to the amino acid sequence of SEQ ID NO:773; and; and/or (c) an HVR-H3 comprising the amino acid sequence of SEQ ID NO:774, or an amino acid sequence with at least about 95% homology to the amino acid sequence of SEQ ID NO:774; and/or wherein the light chain variable domain comprises: (a) an HVR-L1 comprising the amino acid sequence of SEQ ID NO:775, or an amino acid sequence with at least about 95% homology to the amino acid sequence of SEQ ID NO:775; (b) an HVR-L2 comprising the amino acid sequence of SEQ ID NO:776, or an amino acid sequence with at least about 95% homology to the amino acid sequence of SEQ ID NO:776; and/or (c) an HVR-L3 comprising the amino acid sequence of SEQ ID NO:777, or an amino acid sequence with at least about 95% homology to the amino acid sequence of SEQ ID NO:777.

[0319] In some embodiments, the heavy chain variable domain comprises the HVR-H1, HVR-H2, and/or HVR-H3 of the monoclonal antibody Ab21; and/or wherein the light chain variable domain comprises the HVR-L1, HVR-L2, and/or HVR-L3 of the monoclonal antibody Ab21. In some embodiments, the HVR-H1 comprises the amino acid sequence of SEQ ID NO:778. In some embodiments, the HVR-H2 comprises the amino acid sequence of SEQ ID NO:779. In some embodiments, the HVR-H3 comprises the amino acid sequence of SEQ ID NO:780. In some embodiments, the HVR-L1 comprises the amino acid sequence of SEQ ID NO:781. In some embodiments, the HVR-L2 comprises the amino acid sequence of SEQ ID NO:782. In some embodiments, the HVR-L3 comprises the amino acid sequence of SEQ ID NO:783. In some embodiments, the antibody comprises a heavy chain variable domain and a light chain variable domain, wherein the heavy chain variable domain comprises an HVR-H1 comprising the amino acid sequence of SEQ ID NO:778, an HVR-H2 comprising the amino acid sequence of SEQ ID NO:779, and an HVR-H3 comprising the amino acid sequence of SEQ ID NO:780, and/or wherein the light chain variable domain comprises an HVR-L1 comprising the amino acid sequence of SEQ ID NO:781, an HVR-L2 comprising the amino acid sequence of SEQ ID NO:782, and an HVR-L3 comprising the amino acid sequence of SEQ ID NO:783.

[0320] In some embodiments, the heavy chain variable domain comprises: (a) an HVR-H1 comprising the amino acid sequence of SEQ ID NO:778, or an amino acid sequence with at least about 95% homology to the amino acid sequence of SEQ ID NO:778; (b) an HVR-H2 comprising the amino acid sequence of SEQ ID NO:779, or an amino acid sequence with at least about 95% homology to the amino acid sequence of SEQ ID NO:779; and/or (c) an HVR-H3 comprising the amino acid sequence of SEQ ID NO:780, or an amino acid sequence with at least about 95% homology to the amino acid sequence of SEQ ID NO:780, and/or wherein the light chain variable domain comprises: (a) an HVR-L1 comprising the amino acid sequence of SEQ ID NO:781, or an amino acid sequence with at least about 95% homology to the amino acid sequence of SEQ ID NO:781; (b) an HVR-L2 comprising the amino acid sequence of SEQ ID NO:782, or an amino acid sequence with at least about 95% homology to the amino acid sequence of SEQ ID NO:782; and/or (c) an HVR-L3 comprising the amino acid sequence of SEQ ID NO:783, or an amino acid sequence with at least about 95% homology to the amino acid sequence of SEQ ID NO:783.

[0321] In some embodiments, the antibody comprises a heavy chain variable domain and a light chain variable domain, wherein the heavy chain variable domain comprises: (a) an HVR-H1 comprising an amino acid sequence selected from the group consisting of SEQ ID NOS:3-24, 772, and 778; an HVR-H2 comprising an amino acid sequence selected from the group consisting of SEQ ID NOS:25-49, 773, and 779; and (c) an HVR-H3 c comprising an amino acid sequence selected from the group consisting of SEQ ID NOS:50-119, 774, and 780; and/or wherein the light chain variable domain comprises: (a) an HVR-L1 c comprising an amino acid sequence selected from the group consisting of SEQ ID NOS: 120-137, 775, and 781; (b) an HVR-L2 comprising an amino acid sequence selected from the group consisting of SEQ ID NOS: 138-152, 776, and 782; and (c) an HVR-L3 comprising an amino acid sequence selected from the group consisting of SEQ ID NOS: 153-236, 777, and 783. In any of the above embodiments, the light chain variable domain and/or heavy chain variable domain comprises an amino acid sequence with at least about 90% homology to the amino acid sequence indicated.

[0322] In some embodiments, the antibody is an antibody disclosed in Tables 1A, 1B and 8 and FIGS. 20A and 20B of U.S. Patent Application Publication No. US2019/0010230A1, reproduced below as TABLES C1-C2.

TABLE C1
Kabat heavy chain CDR sequences

| Antibody | | | |
|---|---|---|---|
| Name | CDR L1 | CDR L2 | CDR L3 |
| Ab21 | YSFTTYWIG | IIYPGDSDTRYSPSFQG | ARAGHYDGGHLGMDV |
| | (SEQ ID NO: 778) | (SEQ ID NO: 779) | (SEQ ID NO: 780) |
| Ab52 | YTFTSYYIH | IINPSGGSTSYAQKFQG | AREADDSSGYPLGLDV |
| | (SEQ ID NO: 772) | (SEQ ID NO: 773) | (SEQ ID NO: 774) |

TABLE C2
Kabat light chain CDR sequences

| Antibody | | | |
|---|---|---|---|
| Name | CDR L1 | CDR L2 | CDR L3 |
| Ab21 | RASQSVSSSYLA | GASNRAT | QQDDSAPYT |
| | (SEQ ID NO: 781) | (SEQ ID NO: 782) | (SEQ ID NO: 783) |
| Ab52 | RASQSVSSNLA | GASTRAT | QQVNSLPPT |
| | (SEQ ID NO: 775) | (SEQ ID NO: 776) | (SEQ ID NO: 777) |

TABLE C3
Kabat CDR sequences

| Antibody Name | CDR H1 | CDR H2 | CDR H3 | CDR L1 | CDR L2 | CDR L3 |
|---|---|---|---|---|---|---|
| Ab1 | FTFSSYAMS | VISGSGGSTYYADSVKG | AKGTPTLLFQH | RASQSVSSNLA | GASTRAT | QQLPYWPPT |
| | (SEQ ID NO: 377) | (SEQ ID NO: 399) | (SEQ ID NO: 424) | (SEQ ID NO: 494) | (SEQ ID NO: 512) | (SEQ ID NO: 527) |
| Ab2 | FTFSSSAMS | AISGSGGSTYYAD | AKVPSYDYWSGYSNYYYY | RASQSVGSNLA | GASTRAT | QQYFFYPPT |
| | (SEQ ID NO: 378) | SVKG (SEQ ID NO: 400) | MDV (SEQ ID NO: 425) | (SEQ ID NO: 495) | (SEQ ID NO: 512) | (SEQ ID NO: 528) |
| Ab3 | GTFSSYAIS | GIIPIFGTANYAQK | AREQYHVGMDV | QASQDISNYLN | DASNLAT | QQPFNFPYT |
| | (SEQ ID NO: 379) | FQG (SEQ ID NO: 401) | (SEQ ID NO: 426) | (SEQ ID NO: 496) | (SEQ ID NO: 513) | (SEQ ID NO: 529) |
| Ab4 | GTFSSYAIS | GIIPIFGTASYAQK | ARGVDSIMDY | RASQSVSSNLA | SASTRAT | QQDHDYPFT |
| | (SEQ ID NO: 379) | FQG (SEQ ID NO: 402) | (SEQ ID NO: 427) | (SEQ ID NO: 494) | (SEQ ID NO: 514) | (SEQ ID NO: 530) |
| Ab5 | YTFTSYYIH | IINPSGGSTSYAQK | ARAPQESPYVFDI | RASQSVSSSYLA | GASSRAT | QQYFSSPFT |
| | (SEQ ID NO: 380) | FQG (SEQ ID NO: 403) | (SEQ ID NO: 428) | (SEQ ID NO: 497) | (SEQ ID NO: 515) | (SEQ ID NO: 531) |
| Ab6 | YTFTSYYMH | IINPGGGSTSYAQKFQG | ARGSPTYGYLYDP | RASQSVSSYLA | DASKRAT | QQRVNLPPT |
| | (SEQ ID NO: 381) | (SEQ ID NO: 404) | (SEQ ID NO: 429) | (SEQ ID NO: 498) | (SEQ ID NO: 516) | (SEQ ID NO: 532) |
| Ab7 | YTFTSYYMH | IINPSGGSTTYAQKFQG | ARTSSKERDY | RASQSVSSYLA | DASKRAT | QQRISYPIT |
| | (SEQ ID NO: 381) | (SEQ ID NO: 405) | (SEQ ID NO: 430) | (SEQ ID NO: 498) | (SEQ ID NO: 516) | (SEQ ID NO: 533) |
| Ab8 | GSISSSSYYWG | SISYSGSTYYNPSL | ARGPYRLLLGMDV | RASQSISSYLN | GASSLQS | QQIDDTPIT |
| | (SEQ ID NO: 382) | KS (SEQ ID NO: 406) | (SEQ ID NO: 431) | (SEQ ID NO: 499) | (SEQ ID NO: 517) | (SEQ ID NO: 534) |
| Ab9 | YSFTSYWIG | IIYPGDSDTTYSPS | ARLHISGEVNWFD | RASQSVSSYLA | DASNRAT | QQFSYWPWT |
| | (SEQ ID NO: 383) | FQG (SEQ ID NO: 407) | P (SEQ ID NO: 432) | (SEQ ID NO: 498) | (SEQ ID NO: 518) | (SEQ ID NO: 535) |
| Ab10 | YSFTSNWIG | IIYPGDSDTRYSPS | AREAGYDYGELAF | RASQSVSSSYLA | GASSRAT | QQHDSSPPT |
| | (SEQ ID NO: 384) | FQG (SEQ ID NO: 408) | DI (SEQ ID NO: 433) | (SEQ ID NO: 497) | (SEQ ID NO: 515) | (SEQ ID NO: 536) |
| Abl11 | YSFTTYWIG | IIYPGDSDTRYSPS | ARAGHYDGGHLGMDV | RASQSVSSDYLA | GASSRAT | QQDYSYPWT |
| | (SEQ ID NO: 385) | FQG (SEQ ID NO: 408) | (SEQ ID NO: 434) | (SEQ ID NO: 500) | (SEQ ID NO: 515) | (SEQ ID NO: 537) |
| Ab12 | YSFTSYWIG | IIYPGDSDTRYSPSFQG | ARLGHYSGTVSSYGMDV | RASQSISSYLN | AASSLQS | QQEYAVPYT |
| | (SEQ ID NO: 383) | (SEQ ID NO: 408) | (SEQ ID NO: 435) | (SEQ ID NO: 499) | (SEQ ID NO: 519) | (SEQ ID NO: 538) |
| Ab13 | YTFTSYGIS | WISAYNGNTNYA | ARGPSHYYDLA | RASQSVSSYLA | DASNRAT | QQVSNYPIT |
| | (SEQ ID NO: 386) | QKLQG (SEQ ID NO: 409) | (SEQ ID NO: 436) | (SEQ ID NO: 498) | (SEQ ID NO: 518) | (SEQ ID NO: 539) |
| Ab14 | GSISSGGYYWS | NIYYSGSTVYNPS | ARGLYGYGVLDV | QASQDISNYLN | DASNLET | QQVDNIPPT |
| | (SEQ ID NO: 387) | LKS (SEQ ID NO: 410) | (SEQ ID NO: 437) | (SEQ ID NO: 496) | (SEQ ID NO: 520) | (SEQ ID NO: 540) |
| Ab15 | GSISSGGYYWS | NIYYSGSTVYNPS | ARGLYGYGVLDV | QASQDISNYLN | DASNLET | QQFDTYPT |
| | (SEQ ID NO: 387) | LKS (SEQ ID NO: 410) | (SEQ ID NO: 437) | (SEQ ID NO: 496) | (SEQ ID NO: 520) | (SEQ ID NO: 541) |
| Ab16 | GSISSNSYYWG | SIYYSGSTYYNPS | ARGVLGYGVFDY | QASQDISNYLN | DASNLET | QQFLNFPT |
| | (SEQ ID NO: 388) | LKS (SEQ ID NO: 411) | (SEQ ID NO: 438) | (SEQ ID NO: 496) | (SEQ ID NO: 520) | (SEQ ID NO: 542) |
| Ab17 | GSISSNSYYWG | SIYYSGSTYYNPSL | ARGVLGYGVFDY | QASQDISNYLN | DASNLET | QQFFNFPT |
| | (SEQ ID NO: 388) | KS (SEQ ID NO: 411) | (SEQ ID NO: 438) | (SEQ ID NO: 496) | (SEQ ID NO: 520) | (SEQ ID NO: 543) |
| Ab18 | GSISSYYWS | SIYYSGSTNYNPSL | ARDGGGEYPSGTP | QASQDISNYLN | DASNLET | QQFIDLPFT |
| | (SEQ ID NO: 389) | KS (SEQ ID NO: 412) | FDI (SEQ ID NO: 439) | (SEQ ID NO: 496) | (SEQ ID NO: 520) | (SEQ ID NO: 544) |
| Ab19 | GSISSYYWS | SIYYSGSTNYNPSL | ARDGGGEYPSGTP | QASQDISNYLN | DASNLET | QQYYDLPFT |
| | (SEQ ID NO: 389) | KS (SEQ ID NO: 412) | FDI (SEQ ID NO: 439) | (SEQ ID NO: 496) | (SEQ ID NO: 520) | (SEQ ID NO: 545) |
| Ab20 | GSISSYYWS | SIYYSGSTNYNPSL | ARSGMASFFDY | RASQSVSSDYLA | GASSRAT | QQFSSHPFT |
| | (SEQ ID NO: 389) | KS (SEQ ID NO: 412) | (SEQ ID NO: 440) | (SEQ ID NO: 500) | (SEQ ID NO: 515) | (SEQ ID NO: 546) |
| Ab22 | YSFTTYWIG | IIYPGDSDTRYSPS | ARAGHYDGGHLG | RASQSVSSSYLA | GASSRAT | QQDDRSPYT |
| | (SEQ ID NO: 385) | FQG (SEQ ID NO: 408) | MDV (SEQ ID NO: 434) | (SEQ ID NO: 497) | (SEQ ID NO: 515) | (SEQ ID NO: 547) |
| Ab23 | FTFSSYAMS | AISGSGGSTYYAD | AKLGGHSMDV | KSSQSVLYSSNNKNYLA | WASTRES | QQAYLPPIT |
| | (SEQ ID NO: 377) | SVKG (SEQ ID NO: 400) | (SEQ ID NO: 441) | (SEQ ID NO: 501) | (SEQ ID NO: 521) | (SEQ ID NO: 548) |
| Ab24 | FTFSSYAMS | AISGSGGSTYYAD | AKPLKRGRGFY | RASQSISSYLN | AASSLQS | QQAFSPPPWT |
| | (SEQ ID NO: 377) | SVKG (SEQ ID NO: 400) | (SEQ ID NO: 442) | (SEQ ID NO: 499) | (SEQ ID NO: 519) | (SEQ ID NO: 549) |
| Ab25 | FTFSSYAMS | VISGSGGSTYYAD | AKEGRTITMD | RASQSVSSSYLA | GASSRAT | QQDDRSPT |
| | (SEQ ID NO: 377) | SVKG (SEQ ID NO: 399) | (SEQ ID NO: 443) | (SEQ ID NO: 497) | (SEQ ID NO: 515) | (SEQ ID NO: 550) |
| Ab26 | FTFSSYAMS | VISGSGGSTYYAD | AKDQYSVLDY | RASQSVSSYLA | DASNRAT | QQEFDLPFT |
| | (SEQ ID NO: 377) | SVKG (SEQ ID NO: 399) | (SEQ ID NO: 444) | (SEQ ID NO: 498) | (SEQ ID NO: 518) | (SEQ ID NO: 551) |
| Ab27 | FTFSSYAMS | AISGSGGSTYYAD | AKKYSSRGVYFDY | RASQSVSSYLA | DASNRAT | QQYNNFPPT |
| | (SEQ ID NO: 377) | SVKG (SEQ ID NO: 400) | (SEQ ID NO: 445) | (SEQ ID NO: 498) | (SEQ ID NO: 518) | (SEQ ID NO: 552) |
| Ab28 | FTFSSYAMS | AISGSGGSTYYAD | ARLGGAVGARHVT | RASQSVSSYLA | DASKRAT | QQRYLRPIT |
| | (SEQ ID NO: 377) | SVKG (SEQ ID NO: 400) | YFDY (SEQ ID NO: 446) | (SEQ ID NO: 498) | (SEQ ID NO: 516) | (SEQ ID NO: 553) |
| Ab29 | FTFSSYGMH | VISYDGSNKYYAD | ARGQYYGGSGWF | RASQSVSSSYLA | GASSRAT | QQPGAVPT |
| | (SEQ ID NO: 390) | SVKG (SEQ ID NO: 413) | DP (SEQ ID NO: 447) | (SEQ ID NO: 497) | (SEQ ID NO: 515) | (SEQ ID NO: 554) |
| Ab30 | FTFSSYAMS | AISGSGGSTYYAD | ARLGQEYAYFQH | RASQSISSYLN | GASSLQS | QQVYITPIT |
| | (SEQ ID NO: 377) | SVKG (SEQ ID NO: 400) | (SEQ ID NO: 448) | (SEQ ID NO: 499) | (SEQ ID NO: 517) | (SEQ ID NO: 555) |
| Ab31 | FTFSSYGMH | LIWYDGSNKYYA | ARRRDGYYDEVFD | QASQDISNFLN | DASNLET | QQPVDLPFT |
| | (SEQ ID NO: 390) | DSVKG (SEQ ID NO: 414) | I (SEQ ID NO: 449) | (SEQ ID NO: 502) | (SEQ ID NO: 520) | (SEQ ID NO: 556) |
| Ab32 | FTFSSYAMS | AISGSGGSTYYAD | ARVPKHYVVLDY | RASQSVSSYLA | DASNRAT | QQYSFFPPT |
| | (SEQ ID NO: 377) | SVKG (SEQ ID NO: 400) | (SEQ ID NO: 450) | (SEQ ID NO: 498) | (SEQ ID NO: 518) | (SEQ ID NO: 557) |
| Ab33 | FTFSSYGMH | VISYDGSNKYYAD | ARAGGHLFDY | RASQSVSSYLA | DASNRAT | QQDSSFPPT |
| | (SEQ ID NO: 390) | SVKG (SEQ ID NO: 413) | (SEQ ID NO: 451) | (SEQ ID NO: 498) | (SEQ ID NO: 518) | (SEQ ID NO: 558) |
| Ab34 | FTFSSYGMH | VISYDGSNKYYAD | ARDRGGEYVDFAF | RASQSISSYLN | AASSLQS | QQSDFPPWT |
| | (SEQ ID NO: 390) | SVKG (SEQ ID NO: 413) | DI (SEQ ID NO: 452) | (SEQ ID NO: 499) | (SEQ ID NO: 519) | (SEQ ID NO: 559) |
| Ab35 | FTFSSYAMS | AISGSGGSTYYAD | ARTRSGYGASNYF | RASQSISSYLN | AASSLQS | QQGYSAPIT |
| | (SEQ ID NO: 377) | SVKG (SEQ ID NO: 400) | DY (SEQ ID NO: 453) | (SEQ ID NO: 499) | (SEQ ID NO: 519) | (SEQ ID NO: 560) |
| Ab36 | FTFSTYGMH | VIWYDGSNKYYA | ARGTGAAAASPAF | RASQSVSSYLA | DASNRAT | QQLFDWPT |
| | (SEQ ID NO: 391) | DSVKG (SEQ ID NO: 415) | DI (SEQ ID NO: 454) | (SEQ ID NO: 498) | (SEQ ID NO: 518) | (SEQ ID NO: 561) |
| Ab37 | FTFSSYAMS | AISGSGGSTYYAD | ARVGQYMLGMDV | RASQSVSSYLA | DASNRAT | QQRAFLFT |
| | (SEQ ID NO: 377) | SVKG (SEQ ID NO: 400) | (SEQ ID NO: 455) | (SEQ ID NO: 498) | (SEQ ID NO: 518) | (SEQ ID NO: 562) |
| Ab38 | FTFSTYGMH | VIWYDGSNKYYAD | ARGAPVDYGGIEP | RASQSVSSYLA | DASNRAT | QQIDFLPYT |
| | (SEQ ID NO: 391) | SVKG (SEQ ID NO: 415) | EYFQH (SEQ ID NO: 456) | (SEQ ID NO: 498) | (SEQ ID NO: 518) | (SEQ ID NO: 563) |
| Ab39 | FTFSSYAMS | AISGSGGSTYYAD | AKHYHVGIAFDI | RASQSISSYLN | AASSLQS | QQVYSPPIT |
| | (SEQ ID NO: 377) | SVKG (SEQ ID NO: 400) | (SEQ ID NO: 457) | (SEQ ID NO: 499) | (SEQ ID NO: 519) | (SEQ ID NO: 564) |
| Ab40 | FTFSSYAMS | AISGSGGSTYYAD | ARTRSGYGASNYF | RASQSISSYLN | AASSLQS | QQGYAAPIT |
| | (SEQ ID NO: 377) | SVKG (SEQ ID NO: 400) | DY (SEQ ID NO: 453) | (SEQ ID NO: 499) | (SEQ ID NO: 519) | (SEQ ID NO: 565) |
| Ab41 | FTFSTYAMS | AISGSGGSTYYAD | ARAMARKSVAFDI | RASQSVSSYLA | DASNRAT | QQRYALPIT |
| | (SEQ ID NO: 392) | SVKG (SEQ ID NO: 400) | (SEQ ID NO: 458) | (SEQ ID NO: 498) | (SEQ ID NO: 518) | (SEQ ID NO: 566) |
| Ab42 | FTFSSSAMS | AISGSGGSTYYAD | AKVPSYQRGTAFD | RASQSVSSSYLA | GASSRAT | QQYASPPIT |
| | (SEQ ID NO: 378) | SVKG (SEQ ID NO: 400) | P (SEQ ID NO: 459) | (SEQ ID NO: 497) | (SEQ ID NO: 515) | (SEQ ID NO: 567) |
| Ab43 | FTFSSSAMS | AISGSGGSTYYAD | AKSPAVAGIYRAD | RASQSISRYLN | AASSLQS | QQVYSTPIT |
| | (SEQ ID NO: 378) | SVKG (SEQ ID NO: 400) | Y (SEQ ID NO: 460) | (SEQ ID NO: 503) | (SEQ ID NO: 519) | (SEQ ID NO: 568) |
| Ab44 | FTFSTYGMH | VIWYDGSNKYYAD | ARGTGAAAASPAF | RASQSVSSYLA | DSSNRAT | QQLVHWPT |
| | (SEQ ID NO: 391) | SVKG (SEQ ID NO: 415) | DI (SEQ ID NO: 454) | (SEQ ID NO: 498) | (SEQ ID NO: 522) | (SEQ ID NO: 569) |
| Ab45 | YTFTSYYMH | IINPSGGSTSYAQK | ARGPGYTTALDYY | RASQSVSSNLA | GASTRAT | QQLDDWFT |
| | (SEQ ID NO: 381) | FQG (SEQ ID NO: 403) | YMDV (SEQ ID NO: 461) | (SEQ ID NO: 494) | (SEQ ID NO: 512) | (SEQ ID NO: 570) |
| Ab46 | YTFTSYYMH | IINPSGGSTSYAQK | ARPAKTADY | RASQSVSSYLA | DSSNRAT | QQRSNYPIT |
| | (SEQ ID NO: 381) | FQG (SEQ ID NO: 403) | (SEQ ID NO: 462) | (SEQ ID NO: 498) | (SEQ ID NO: 522) | (SEQ ID NO: 571) |
| Ab47 | YTFTSYYMH | IINPSGGSTTYAQK | ARPGKSMDV | RASQSVSSYLA | DASNRAT | QQRILYPIT |
| | (SEQ ID NO: 381) | FQG (SEQ ID NO: 405) | (SEQ ID NO: 463) | (SEQ ID NO: 498) | (SEQ ID NO: 518) | (SEQ ID NO: 572) |
| Ab48 | YTFTSYYMH | IINPSGGSTTYAQK | ARPGKSMDV | RASQSVSSYLA | DASNRAT | QQRAAYPIT |
| | (SEQ ID NO: 381) | FQG (SEQ ID NO: 405) | (SEQ ID NO: 463) | (SEQ ID NO: 498) | (SEQ ID NO: 518) | (SEQ ID NO: 573) |
| Ab49 | YTFTSYYMH | IINPSGGSTSYAQK | ARPAKTADY | RASQSVSSYLA | DASKRAT | QQRTSHPIT |
| | (SEQ ID NO: 381) | FQG (SEQ ID NO: 403) | (SEQ ID NO: 462) | (SEQ ID NO: 498) | (SEQ ID NO: 516) | (SEQ ID NO: 574) |
| Ab50 | YTFTSYYIH | IINPSGGSTSYAQK | ARAPQESPYVFDI | RASQSVSSSYLA | GASSRAT | QQYAGSPFT |
| | (SEQ ID NO: 380) | FQG (SEQ ID NO: 403) | (SEQ ID NO: 428) | (SEQ ID NO: 497) | (SEQ ID NO: 515) | (SEQ ID NO: 575) |
| Ab51 | YTFTSYYMH | IINPSGGSTSYAQK | ARGVGGQDYYYM | RASQSISSYLN | AASSLQS | QQFDDVFT |
| | (SEQ ID NO: 381) | FQG (SEQ ID NO: 403) | DV (SEQ ID NO: 464) | (SEQ ID NO: 499) | (SEQ ID NO: 519) | (SEQ ID NO: 576) |
| Ab53 | YTFTSYYIH | IINPSGGSTSYAQK | ARAPQESPYVFDI | RASQSVSSSYLA | GASSRAT | QQYVNSPFT |
| | (SEQ ID NO: 380) | FQG (SEQ ID NO: 403) | (SEQ ID NO: 428) | (SEQ ID NO: 497) | (SEQ ID NO: 515) | (SEQ ID NO: 577) |
| Ab54 | YTFTSYYMH | IINPSGGSTSYAQK | ARGPGYTTALDYY | RASQSINSYLN | AASSLQS | QQSDDDPFT |
| | (SEQ ID NO: 381) | FQG (SEQ ID NO: 403) | YMDV (SEQ ID NO: 461) | (SEQ ID NO: 504) | (SEQ ID NO: 519) | (SEQ ID NO: 578) |
| Ab55 | YTFTGSYMH | WINPNSGGTNYAQ | ARGPLYHPMIFDY | RASQSVSSYLA | DASNRAT | QQLSTYPLT |
| | (SEQ ID NO: 393) | KFQG (SEQ ID NO: 416) | (SEQ ID NO: 465) | (SEQ ID NO: 498) | (SEQ ID NO: 518) | (SEQ ID NO: 579) |
| Ab56 | YTFTGYYMH | SINPNSGGTNYAQ | ARASSVDN | RASQSVSSYLA | DASNRAT | QQRSVYPIT |
| | (SEQ ID NO: 394) | KFQG (SEQ ID NO: 417) | (SEQ ID NO: 466) | (SEQ ID NO: 498) | (SEQ ID NO: 518) | (SEQ ID NO: 580) |
| Ab57 | YTFTNYGIS | WISAYNGNTNYA | ARGPTKAYYGSGS | RASQSVSSYLA | DASKRAT | QQVSLFPLT |
| | (SEQ ID NO: 395) | QKLQG (SEQ ID NO: 409) | YVVFDP (SEQ ID NO: 467) | (SEQ ID NO: 498) | (SEQ ID NO: 516) | (SEQ ID NO: 581) |
| Ab58 | YSFTSYWIG | IIYPGDSDTRYSPS | ARLGIYSTGATAF | RASQSISSWLA | DASSLES | LDYNSYSPIT |
| | (SEQ ID NO: 383) | FQG (SEQ ID NO: 408) | DI (SEQ ID NO: 468) | (SEQ ID NO: 505) | (SEQ ID NO: 523) | (SEQ ID NO: 582) |
| Ab59 | YTFTGSYMH | WINPNSGGTNYAQ | ARGGVWYSLFDI | QASQDISNYLN | DASNLET | QQHIALPFT |
| | (SEQ ID NO: 393) | KFQG (SEQ ID NO: 416) | (SEQ ID NO: 469) | (SEQ ID NO: 496) | (SEQ ID NO: 520) | (SEQ ID NO: 583) |
| Ab60 | YTFTGYYMH | WINPNSGGTSYAQ | ARASKMGDD | RASQSVSSYLA | DASKRAT | QQRASMPIT |
| | (SEQ ID NO: 394) | KFQG (SEQ ID NO: 418) | (SEQ ID NO: 470) | (SEQ ID NO: 498) | (SEQ ID NO: 516) | (SEQ ID NO: 584) |
| Ab61 | YTFTSYGIH | WISAYNGNTNYA | ARGGVPRVSYFQH | RASQSVSSYLA | DSSNRAT | QQAFNRPPT |
| | (SEQ ID NO: 396) | QKLQG (SEQ ID NO: 409) | (SEQ ID NO: 471) | (SEQ ID NO: 498) | (SEQ ID NO: 522) | (SEQ ID NO: 585) |
| Ab62 | YSFTSYWIG | IIYPGDSDTRYSPS | ARAGHYDDWSGL | RASQSVSSYLA | DASKRAT | QQSSVHPYT |
| | (SEQ ID NO: 383) | FQG (SEQ ID NO: 408) | GLDV (SEQ ID NO: 472) | (SEQ ID NO: 498) | (SEQ ID NO: 516) | (SEQ ID NO: 586) |
| Ab63 | YTFTSYGIS | WISTYNGNTNYAQ | ARGSGSGYDSWY | RASQGIDSWLA | AASSLQS | QQAYSLPPT |
| | (SEQ ID NO: 386) | KLQG (SEQ ID NO: 419) | D (SEQ ID NO: 473) | (SEQ ID NO: 506) | (SEQ ID NO: 519) | (SEQ ID NO: 587) |
| Ab64 | YSFTSYWIG | IIYPGDSDTRYSPS | ARLGRWSSGSTAF | RASQSVSSNLA | GASTRAT | QQDDDGYT |
| | (SEQ ID NO: 383) | FQG (SEQ ID NO: 408) | DI (SEQ ID NO: 474) | (SEQ ID NO: 494) | (SEQ ID NO: 512) | (SEQ ID NO: 588) |
| Ab65 | YSFTSYWIG | IIYPGDSDTRYSPS | ARLGRKPSGSVAF | RASQSVSSYLA | DASNRAT | QQDYSWPYT |
| | (SEQ ID NO: 383) | FQG (SEQ ID NO: 408) | DI (SEQ ID NO: 475) | (SEQ ID NO: 498) | (SEQ ID NO: 518) | (SEQ ID NO: 589) |
| Ab66 | YTFTGSYMH | WINPNSGGTNYAQ | ARAGHKTHDY | RASQSVSSYLA | DASNRAT | QQRSAYPIT |
| | (SEQ ID NO: 393) | KFQG (SEQ ID NO: 416) | (SEQ ID NO: 476) | (SEQ ID NO: 498) | (SEQ ID NO: 518) | (SEQ ID NO: 590) |
| Ab67 | YTFTSYYMH | IINPSGGSTTYAQK | ARPGKSMDV | RASQSVSSYLA | DASNRAT | QQRSHFPIT |
| | (SEQ ID NO: 381) | FQG (SEQ ID NO: 405) | (SEQ ID NO: 463) | (SEQ ID NO: 498) | (SEQ ID NO: 518) | (SEQ ID NO: 591) |
| Ab68 | FTFSSYGMH | LIWYDGSNKYYA | AKPGSMTDY | RASQSVSSYLA | DASNRAT | QQRANYPIT |
| | (SEQ ID NO: 390) | DSVKG (SEQ ID NO: 414) | (SEQ ID NO: 477) | (SEQ ID NO: 498) | (SEQ ID NO: 518) | (SEQ ID NO: 592) |
| Ab69 | YTFTGSYMH | WINPNSGGTNYAQ | ARAKSVDHDY | RASQSVSSYLA | DASNRAT | QQRADYPIT |
| | (SEQ ID NO: 393) | KFQG (SEQ ID NO: 416) | (SEQ ID NO: 478) | (SEQ ID NO: 498) | (SEQ ID NO: 518) | (SEQ ID NO: 593) |
| Ab70 | YTFTGYYMH | WINPNSGGTSYAQ | ARASKMGDD | RASQSVSSYLA | DASNRAT | QQRSVYPIT |
| | (SEQ ID NO: 394) | KFQG (SEQ ID NO: 418) | (SEQ ID NO: 470) | (SEQ ID NO: 498) | (SEQ ID NO: 518) | (SEQ ID NO: 580) |
| Ab71 | YTFTSYYMH | IINPSGGSTSYAQK | ARDISTHDYDLAF | RASQSVSSSYLA | GASNRAT | QQAGSHPFT |
| | (SEQ ID NO: 381) | FQG (SEQ ID NO: 403) | DI (SEQ ID NO: 479) | (SEQ ID NO: 497) | (SEQ ID NO: 524) | (SEQ ID NO: 594) |
| Ab72 | GSISSYYWS | SIYYSGSTNYNPSL | ARSGTETLFDY | QASQDITNYLN | DASNLET | QQDVNYPPT |
| | (SEQ ID NO: 389) | KS (SEQ ID NO: 412) | (SEQ ID NO: 480) | (SEQ ID NO: 507) | (SEQ ID NO: 520) | (SEQ ID NO: 595) |
| Ab73 | YSFTSYWIG | IIYPGDSDTTYSPS | ARAKMLDDGYAF | RASQSVSSNLA | GASTRAT | QQDDNYPYT |
| | (SEQ ID NO: 383) | FQG (SEQ ID NO: 407) | DI (SEQ ID NO: 481) | (SEQ ID NO: 494) | (SEQ ID NO: 512) | (SEQ ID NO: 596) |
| Ab74 | YTFTGSYMH | WINPNSGGTNYAQ | ARAGHKTHDY | RASQSVSSYLA | DASNRAT | QQRSTFPIT |
| | (SEQ ID NO: 393) | KFQG (SEQ ID NO: 416) | (SEQ ID NO: 476) | (SEQ ID NO: 498) | (SEQ ID NO: 518) | (SEQ ID NO: 597) |
| Ab75 | YTFTGYYMH | WINPNSGGTNYAQ | ARDLGYSSLLALDI | RASQSVSSYLA | DASNRAT | QQVSNYPFT |
| | (SEQ ID NO: 394) | KFQG (SEQ ID NO: 416) | (SEQ ID NO: 482) | (SEQ ID NO: 498) | (SEQ ID NO: 518) | (SEQ ID NO: 598) |
| Ab76 | FTFSSYSMN | SISSSSSYIYYADS | ARGGGRRGDNNW | KSSQSVLYSSNNKNYLA | WASTRES | QQYHDAPIT |
| | (SEQ ID NO: 397) | VKG (SEQ ID NO: 420) | FDP (SEQ ID NO: 483) | (SEQ ID NO: 501) | (SEQ ID NO: 521) | (SEQ ID NO: 599) |
| Ab77 | FTFSSYGMH | VISYDGSNKYYAD | ARGPPHEMDY | KSSQSVLYSSNNKNYLA | WASTRES | QQAYVVPPT |
| | (SEQ ID NO: 390) | SVKG (SEQ ID NO: 413) | (SEQ ID NO: 484) | (SEQ ID NO: 501) | (SEQ ID NO: 521) | (SEQ ID NO: 600) |
| Ab78 | FTFSSYGMH | VIWYDGSNKYYA | ARTPYPWIYFDL | RASQSVSSYLA | DASNRAT | QQADNWPFT |
| | (SEQ ID NO: 390) | DSVKG (SEQ ID NO: 415) | (SEQ ID NO: 485) | (SEQ ID NO: 498) | (SEQ ID NO: 518) | (SEQ ID NO: 601) |
| Ab79 | FTFSSYSMN | YISGSSSTIYYADS | ARGGRRHYGGMD | RSSQSLLHSNGY | LGSHRAS | MQALESPRT |
| | (SEQ ID NO: 397) | VKG (SEQ ID NO: 421) | V (SEQ ID NO: 486) | NYLD (SEQ ID NO: 508) | (SEQ ID NO: 525) | (SEQ ID NO: 602) |
| Ab80 | GTFSSYAIS | GIIPIFGTANYAQK | ARGGGTFWSGSW | RASQSVSSYLA | DASNRAT | QQYVNWPFT |
| | (SEQ ID NO: 379) | FQG (SEQ ID NO: 401) | ALY (SEQ ID NO: 487) | (SEQ ID NO: 498) | (SEQ ID NO: 518) | (SEQ ID NO: 603) |
| Ab81 | GTFSSYAIS | GIIPIFGTANYAQK | ARDSGNYDYWSG | RASQSVSSYLA | DASNRAT | QQSSNWPWT |
| | (SEQ ID NO: 379) | FQG (SEQ ID NO: 401) | ALRY (SEQ ID NO: 488) | (SEQ ID NO: 498) | (SEQ ID NO: 518) | (SEQ ID NO: 604) |
| Ab82 | GSISSGGYYWS | YIYYSGSTVYNPS | ARVSSSWYKA | RASQGISSWLA | AASSLQS | QQASTFPIT |
| | (SEQ ID NO: 387) | LKS (SEQ ID NO: 422) | (SEQ ID NO: 489) | (SEQ ID NO: 509) | (SEQ ID NO: 519) | (SEQ ID NO: 605) |
| Ab83 | GSFSGYYWS | EIDHSGSTKYNPSL | ARVGVVVGRPGYS | RASQGISSWLA | AASSLQS | QQRNSLPLT |
| | (SEQ ID NO: 398) | KS (SEQ ID NO: 423) | AFDI (SEQ ID NO: 490) | (SEQ ID NO: 509) | (SEQ ID NO: 519) | (SEQ ID NO: 606) |
| Ab84 | YTFTSYGIS | WISTYNGNTNYAQ | ARGSGSGYDSWY | RASQSISSYLN | AASSLQS | QQSYDFPIT |
| | (SEQ ID NO: 386) | KLQG (SEQ ID NO: 419) | D (SEQ ID NO: 473) | (SEQ ID NO: 499) | (SEQ ID NO: 519) | (SEQ ID NO: 607) |
| Ab85 | FTFSSYGMH | VIWYDGSNKYYAD | AKDLGGYYGGAA | RASQDISSWLA | AASSLQS | QQEVDYPPLT |
| | (SEQ ID NO: 390) | SVKG (SEQ ID NO: 415) | YGMDV (SEQ ID NO: 491) | (SEQ ID NO: 510) | (SEQ ID NO: 519) | (SEQ ID NO: 608) |
| Ab86 | FTFSSYGMH | VISYDGSNKYYAD | AKDGVYYGLGNW | RASQSISSWLA | KASSLES | QQLNSYSPT |
| | (SEQ ID NO: 390) | SVKG (SEQ ID NO: 413) | FDP (SEQ ID NO: 492) | (SEQ ID NO: 505) | (SEQ ID NO: 526) | (SEQ ID NO: 609) |
| Ab87 | GSISSYYWS | SIYYSGSTNYNPSL | ARHGWDRVGWFD | RASQSVSRYLA | DASNRAT | QQYIFWPPT |
| | (SEQ ID NO: 389) | KS (SEQ ID NO: 412) | P (SEQ ID NO: 493) | (SEQ ID NO: 511) | (SEQ ID NO: 518) | (SEQ ID NO: 610) |

TABLE C4
Heavy chain variable regions

| Ab ID | HC Variable Region Sequences |
|---|---|
| Ab 1 | EVQLLESGGGLVQPGGSLRLSCAASGFTFSSYAMSWVRQAPGKGLEWVSVISGSGGSTY |
| | YADSVKGRFTISRDNSKNTLYLQMNSLRAEDTAVYYCAKGTPTLLFQHWGQGTLVTVSS |
| | (SEQ ID NO: 616) |
| Ab 2 | EVQLLESGGGLVQPGGSLRLSCAASGFTFSSSAMSWVRQAPGKGLEWVSAISGSGGSTYY |
| | ADSVKGRFTISRDNSKNTLYLQMNSLRAEDTAVYYCAKVPSYDYWSGYSNYYYYMDV |
| | WGKGTTVTVSS (SEQ ID NO: 618) |
| Ab 3 | QVQLVQSGAEVKKPGSSVKVSCKASGGTFSSYAISWVRQAPGQGLEWMGGIIPIFGTANY |
| | AQKFQGRVTITADESTSTAYMELSSLRSEDTAVYYCAREQYHVGMDVWGKGTTVTVSS |
| | (SEQ ID NO: 620) |
| Ab 4 | QVQLVQSGAEVKKPGSSVKVSCKASGGTFSSYAISWVRQAPGQGLEWMGGIIPIFGTASY |
| | AQKFQGRVTITADESTSTAYMELSSLRSEDTAVYYCARGVDSIMDYWGQGTLVTVSS |
| | (SEQ ID NO: 622) |
| Ab 5 | QVQLVQSGAEVKKPGASVKVSCKASGYTFTSYYTHWVRQAPGQGLEWMGIINPSGGSTS |
| | YAQKFQGRVTMTRDTSTSTVYMELSSLRSEDTAVYYCARAPQESPYVFDIWGQGTMVTV |
| | SS (SEQ ID NO: 624) |
| Ab 6 | QVQLVQSGAEVKKPGASVKVSCKASGYTFTSYYMHWVRQAPGQGLEWMGIINPGGGST |
| | SYAQKFQGRVTMTRDTSTSTVYMELSSLRSEDTAVYYCARGSPTYGYLYDPWGQGTLVT |
| | VSS (SEQ ID NO: 626) |
| Ab 7 | QVQLVQSGAEVKKPGASVKVSCKASGYTFTSYYMHWVRQAPGQGLEWMGIINPSGGST |
| | TYAQKFQGRVTMTRDTSTSTVYMELSSLRSEDTAVYYCARTSSKERDYWGQGTLVTVSS |
| | (SEQ ID NO: 628) |
| Ab 8 | QLQLQESGPGLVKPSETLSLTCTVSGGSISSSSYYWGWIRQPPGKGLEWIGSISYSGSTYYN |
| | PSLKSRVTISVDTSKNQFSLKLSSVTAADTAVYYCARGPYRLLLGMDVWGQGTTVTVSS |
| | (SEQ ID NO: 630) |
| Ab 9 | EVQLVQSGAEVKKPGESLKISCKGSGYSFTSYWIGWVRQMPGKGLEWMGITYPGDSDTT |
| | YSPSFQGQVTISADKSISTAYLQWSSLKASDTAMYYCARLHISGEVNWFDPWGQGTLVTV |
| | SS (SEQ ID NO: 632) |
| Ab 10 | EVQLVQSGAEVKKPGESLKISCKGSGYSFTSNWIGWVRQMPGKGLEWMGITYPGDSDTR |
| | YSPSFQGQVTISADKSISTAYLQWSSLKASDTAMYYCAREAGYDYGELAFDIWGQGTMV |
| | TVSS (SEQ ID NO: 634) |
| Ab 11 | EVQLVQSGAEVKKPGESLKISCKGSGYSFTTYWIGWVRQMPGKGLEWMGITYPGDSDTR |
| | YSPSFQGQVTISADKSISTAYLQWSSLKASDTAMYYCARAGHYDGGHLGMDVWGQGTT |
| | VTVSS (SEQ ID NO: 636) |
| Ab 12 | EVQLVQSGAEVKKPGESLKISCKGSGYSFTSYWIGWVRQMPGKGLEWMGITYPGDSDTR |
| | YSPSFQGQVTISADKSISTAYLQWSSLKASDTAMYYCARLGHYSGTVSSYGMDVWGQGT |
| | TVTVSS (SEQ ID NO: 638) |
| Ab 13 | QVQLVQSGAEVKKPGASVKVSCKASGYTFTSYGISWVRQAPGQGLEWMGWISAYNGNT |
| | NYAQKLQGRVTMTTDTSTSTAYMELRSLRSDDTAVYYCARGPSHYYDLAWGQGTLVTV |
| | SS (SEQ ID NO: 640) |
| Ab 14 | QVQLQESGPGLVKPSQTLSLTCTVSGGSISSGGYYWSWIRQHPGKGLEWIGNIYYSGSTVY |
| | NPSLKSRVTISVDTSKNQFSLKLSSVTAADTAVYYCARGLYGYGVLDVWGQGTMVTVSS |
| | (SEQ ID NO: 642) |
| Ab 15 | QVQLQESGPGLVKPSQTLSLTCTVSGGSISSGGYYWSWIRQHPGKGLEWIGNIYYSGSTVY |
| | NPSLKSRVTISVDTSKNQFSLKLSSVTAADTAVYYCARGLYGYGVLDVWGQGTMVTVSS |
| | (SEQ ID NO: 642) |
| Ab 16 | QLQLQESGPGLVKPSETLSLTCTVSGGSISSNSYYWGWIRQPPGKGLEWIGSIYYSGSTYY |
| | NPSLKSRVTISVDTSKNQFSLKLSSVTAADTAVYYCARGVLGYGVFDYWGQGTLVTVSS |
| | (SEQ ID NO: 645) |
| Ab 17 | QLQLQESGPGLVKPSETLSLTCTVSGGSISSNSYYWGWIRQPPGKGLEWIGSIYYSGSTYY |
| | NPSLKSRVTISVDTSKNQFSLKLSSVTAADTAVYYCARGVLGYGVFDYWGQGTLVTVSS |
| | (SEQ ID NO: 645) |
| Ab 18 | QVQLQESGPGLVKPSETLSLTCTVSGGSISSYYWSWIRQPPGKGLEWIGSIYYSGSTNYNPS |
| | LKSRVTISVDTSKNQFSLKLSSVTAADTAVYYCARDGGGEYPSGTPFDIWGQGTMVTVSS |
| | (SEQ ID NO: 648) |
| Ab 19 | QVQLQESGPGLVKPSETLSLTCTVSGGSISSYYWSWIRQPPGKGLEWIGSIYYSGSTNYNPS |
| | LKSRVTISVDTSKNQFSLKLSSVTAADTAVYYCARDGGGEYPSGTPFDIWGQGTMVTVSS |
| | (SEQ ID NO: 648) |
| Ab 20 | QVQLQESGPGLVKPSETLSLTCTVSGGSISSYYWSWIRQPPGKGLEWIGSIYYSGSTNYNPS |
| | LKSRVTISVDTSKNQFSLKLSSVTAADTAVYYCARSGMASFFDYWGQGTLVTVSS |
| | (SEQ ID NO: 651) |
| Ab 22 | EVQLVQSGAEVKKPGESLKISCKGSGYSFTTYWIGWVRQMPGKGLEWMGITYPGDSDTR |
| | YSPSFQGQVTISADKSISTAYLQWSSLKASDTAMYYCARAGHYDGGHLGMDVWGQGTT |
| | VTVSS (SEQ ID NO: 636) |
| Ab 23 | EVQLLESGGGLVQPGGSLRLSCAASGFTFSSYAMSWVRQAPGKGLEWVSAISGSGGSTY |
| | YADSVKGRFTISRDNSKNTLYLQMNSLRAEDTAVYYCAKLGGHSMDVWGQGTTVTVSS |
| | (SEQ ID NO: 654) |
| Ab 24 | EVQLLESGGGLVQPGGSLRLSCAASGFTFSSYAMSWVRQAPGKGLEWVSAISGSGGSTY |
| | YADSVKGRFTISRDNSKNTLYLQMNSLRAEDTAVYYCAKPLKRGRGFYWGQGTLVTVSS |
| | (SEQ ID NO: 656) |
| Ab 25 | EVQLLESGGGLVQPGGSLRLSCAASGFTFSSYAMSWVRQAPGKGLEWVSVISGSGGSTY |
| | YADSVKGRFTISRDNSKNTLYLQMNSLRAEDTAVYYCAKEGRTITMDWGQGTLVTVSS |
| | (SEQ ID NO: 658) |
| Ab 26 | EVQLLESGGGLVQPGGSLRLSCAASGFTFSSYAMSWVRQAPGKGLEWVSVISGSGGSTY |
| | YADSVKGRFTISRDNSKNTLYLQMNSLRAEDTAVYYCAKDQYSVLDYWGQGTLVTVSS |
| | (SEQ ID NO: 660) |
| Ab 27 | EVQLLESGGGLVQPGGSLRLSCAASGFTFSSYAMSWVRQAPGKGLEWVSAISGSGGSTY |
| | YADSVKGRFTISRDNSKNTLYLQMNSLRAEDTAVYYCAKKYSSRGVYFDYWGQGTLVT |
| | VSS (SEQ ID NO: 662) |
| Ab 28 | EVQLLESGGGLVQPGGSLRLSCAASGFTFSSYAMSWVRQAPGKGLEWVSAISGSGGSTY |
| | YADSVKGRFTISRDNSKNTLYLQMNSLRAEDTAVYYCARLGGAVGARHVTYFDYWGQG |
| | TLVTVSS (SEQ ID NO: 664) |
| Ab 29 | QVQLVESGGGVVQPGRSLRLSCAASGFTFSSYGMHWVRQAPGKGLEWVAVISYDGSNK |
| | YYADSVKGRFTISRDNSKNTLYLQMNSLRAEDTAVYYCARGQYYGGSGWFDPWGQGTL |
| | VTVSS (SEQ ID NO: 666) |
| Ab 30 | EVQLLESGGGLVQPGGSLRLSCAASGFTFSSYAMSWVRQAPGKGLEWVSAISGSGGSTY |
| | YADSVKGRFTISRDNSKNTLYLQMNSLRAEDTAVYYCARLGQEYAYFQHWGQGTLVTV |
| | SS (SEQ ID NO: 668) |
| Ab 31 | QVQLVESGGGVVQPGRSLRLSCAASGFTFSSYGMHWVRQAPGKGLEWVALIWYDGSNK |
| | YYADSVKGRFTISRDNSKNTLYLQMNSLRAEDTAVYYCARRRDGYYDEVFDIWGQGTM |
| | VTVSS (SEQ ID NO: 670) |
| Ab 32 | EVQLLESGGGLVQPGGSLRLSCAASGFTFSSYAMSWVRQAPGKGLEWVSAISGSGGSTY |
| | YADSVKGRFTISRDNSKNTLYLQMNSLRAEDTAVYYCARVPKHYVVLDYWGQGTLVTV |
| | SS (SEQ ID NO: 672) |
| Ab 33 | QVQLVESGGGVVQPGRSLRLSCAASGFTFSSYGMHWVRQAPGKGLEWVAVISYDGSNK |
| | YYADSVKGRFTISRDNSKNTLYLQMNSLRAEDTAVYYCARAGGHLFDYWGQGTLVTVS |
| | S (SEQ ID NO: 674) |
| Ab 34 | QVQLVESGGGVVQPGRSLRLSCAASGFTFSSYGMHWVRQAPGKGLEWVAVISYDGSNK |
| | YYADSVKGRFTISRDNSKNTLYLQMNSLRAEDTAVYYCARDRGGEYVDFAFDIWGQGT |
| | MVTVSS (SEQ ID NO: 676) |
| Ab 35 | EVQLLESGGGLVQPGGSLRLSCAASGFTFSSYAMSWVRQAPGKGLEWVSAISGSGGSTY |
| | YADSVKGRFTISRDNSKNTLYLQMNSLRAEDTAVYYCARTRSGYGASNYFDYWGQGTL |
| | VTVSS (SEQ ID NO: 678) |
| Ab 36 | QVQLVESGGGVVQPGRSLRLSCAASGFTFSTYGMHWVRQAPGKGLEWVAVIWYDGSNK |
| | YYADSVKGRFTISRDNSKNTLYLQMNSLRAEDTAVYYCARGTGAAAASPAFDIWGQGT |
| | MVTVSS (SEQ ID NO: 680) |
| Ab 37 | EVQLLESGGGLVQPGGSLRLSCAASGFTFSSYAMSWVRQAPGKGLEWVSAISGSGGSTY |
| | YADSVKGRFTISRDNSKNTLYLQMNSLRAEDTAVYYCARVGQYMLGMDVWGQGTTVT |
| | VSS (SEQ ID NO: 682) |
| Ab 38 | QVQLVESGGGVVQPGRSLRLSCAASGFTFSTYGMHWVRQAPGKGLEWVAVIWYDGSNK |
| | YYADSVKGRFTISRDNSKNTLYLQMNSLRAEDTAVYYCARGAPVDYGGIEPEYFQHWGQ |
| | GTLVTVSS (SEQ ID NO: 684) |
| Ab 39 | EVQLLESGGGLVQPGGSLRLSCAASGFTFSSYAMSWVRQAPGKGLEWVSAISGSGGSTY |
| | YADSVKGRFTISRDNSKNTLYLQMNSLRAEDTAVYYCAKHYHVGIAFDIWGQGTMVTVS |
| | S (SEQ ID NO: 686) |
| Ab 40 | EVQLLESGGGLVQPGGSLRLSCAASGFTFSSYAMSWVRQAPGKGLEWVSAISGSGGSTY |
| | YADSVKGRFTISRDNSKNTLYLQMNSLRAEDTAVYYCARTRSGYGASNYFDYWGQGTL |
| | VTVSS (SEQ ID NO: 678) |
| Ab 41 | EVQLLESGGGLVQPGGSLRLSCAASGFTFSTYAMSWVRQAPGKGLEWVSAISGSGGSTY |
| | YADSVKGRFTISRDNSKNTLYLQMNSLRAEDTAVYYCARAMARKSVAFDIWGQGTMVT |
| | VSS (SEQ ID NO: 689) |
| Ab 42 | EVQLLESGGGLVQPGGSLRLSCAASGFTFSSSAMSWVRQAPGKGLEWVSAISGSGGSTYY |
| | ADSVKGRFTISRDNSKNTLYLQMNSLRAEDTAVYYCAKVPSYQRGTAFDPWGQGTLVTV |
| | SS (SEQ ID NO: 691) |
| Ab 43 | EVQLLESGGGLVQPGGSLRLSCAASGFTFSSSAMSWVRQAPGKGLEWVSAISGSGGSTYY |
| | ADSVKGRFTISRDNSKNTLYLQMNSLRAEDTAVYYCAKSPAVAGIYRADYWGQGTLVTV |
| | SS (SEQ ID NO: 693) |
| Ab 44 | QVQLVESGGGVVQPGRSLRLSCAASGFTFSTYGMHWVRQAPGKGLEWVAVIWYDGSNK |
| | YYADSVKGRFTISRDNSKNTLYLQMNSLRAEDTAVYYCARGTGAAAASPAFDIWGQGT |
| | MVTVSS (SEQ ID NO: 680) |
| Ab 45 | QVQLVQSGAEVKKPGASVKVSCKASGYTFTSYYMHWVRQAPGQGLEWMGIINPSGGST |
| | SYAQKFQGRVTMTRDTSTSTVYMELSSLRSEDTAVYYCARGPGYTTALDYYYMDVWGK |
| | GTTVTVSS (SEQ ID NO: 696) |
| Ab 46 | QVQLVQSGAEVKKPGASVKVSCKASGYTFTSYYMHWVRQAPGQGLEWMGIINPSGGST |
| | SYAQKFQGRVTMTRDTSTSTVYMELSSLRSEDTAVYYCARPAKTADYWGQGTLVTVSS |
| | (SEQ ID NO: 698) |
| Ab 47 | QVQLVQSGAEVKKPGASVKVSCKASGYTFTSYYMHWVRQAPGQGLEWMGIINPSGGST |
| | TYAQKFQGRVTMTRDTSTSTVYMELSSLRSEDTAVYYCARPGKSMDVWGQGTTVTVSS |
| | (SEQ ID NO: 700) |
| Ab 48 | QVQLVQSGAEVKKPGASVKVSCKASGYTFTSYYMHWVRQAPGQGLEWMGIINPSGGST |
| | TYAQKFQGRVTMTRDTSTSTVYMELSSLRSEDTAVYYCARPGKSMDVWGQGTTVTVSS |
| | (SEQ ID NO: 700) |
| Ab 49 | QVQLVQSGAEVKKPGASVKVSCKASGYTFTSYYMHWVRQAPGQGLEWMGIINPSGGST |
| | SYAQKFQGRVTMTRDTSTSTVYMELSSLRSEDTAVYYCARPAKTADYWGQGTLVTVSS |
| | (SEQ ID NO: 698) |
| Ab 50 | QVQLVQSGAEVKKPGASVKVSCKASGYTFTSYYIHWVRQAPGQGLEWMGIINPSGGSTS |
| | YAQKFQGRVTMTRDTSTSTVYMELSSLRSEDTAVYYCARAPQESPYVFDIWGQGTMVTV |
| | SS (SEQ ID NO: 624) |
| Ab 51 | QVQLVQSGAEVKKPGASVKVSCKASGYTFTSYYMHWVRQAPGQGLEWMGIINPSGGST |
| | SYAQKFQGRVTMTRDTSTSTVYMELSSLRSEDTAVYYCARGVGGQDYYYMDVWGKGT |
| | TVTVSS (SEQ ID NO: 705) |
| Ab 53 | QVQLVQSGAEVKKPGASVKVSCKASGYTFTSYYIHWVRQAPGQGLEWMGIINPSGGSTS |
| | YAQKFQGRVTMTRDTSTSTVYMELSSLRSEDTAVYYCARAPQESPYVFDIWGQGTMVTV |
| | SS (SEQ ID NO: 624) |
| Ab 54 | QVQLVQSGAEVKKPGASVKVSCKASGYTFTSYYMHWVRQAPGQGLEWMGIINPSGGST |
| | SYAQKFQGRVTMTRDTSTSTVYMELSSLRSEDTAVYYCARGPGYTTALDYYYMDVWGK |
| | GTTVTVSS (SEQ ID NO: 696) |
| Ab 55 | QVQLVQSGAEVKKPGASVKVSCKASGYTFTGSYMHWVRQAPGQGLEWMGWINPNSGG |
| | TNYAQKFQGRVTMTRDTSISTAYMELSRLRSDDTAVYYCARGPLYHPMIFDYWGQGTLV |
| | TVSS (SEQ ID NO: 709) |
| Ab 56 | QVQLVQSGAEVKKPGASVKVSCKASGYTFTGYYMHWVRQAPGQGLEWMGSINPNSGG |
| | TNYAQKFQGRVTMTRDTSISTAYMELSRLRSDDTAVYYCARASSVDNWGQGTLVTVSS |
| | (SEQ ID NO: 711) |
| Ab 57 | QVQLVQSGAEVKKPGASVKVSCKASGYTFTNYGISWVRQAPGQGLEWMGWISAYNGNT |
| | NYAQKLQGRVTMTTDTSTSTAYMELRSLRSDDTAVYYCARGPTKAYYGSGSYVVFDPW |
| | GQGTLVTVSS (SEQ ID NO: 713) |
| Ab 58 | EVQLVQSGAEVKKPGESLKISCKGSGYSFTSYWIGWVRQMPGKGLEWMGITYPGDSDTR |
| | YSPSFQGQVTISADKSISTAYLQWSSLKASDTAMYYCARLGIYSTGATAFDIWGQGTMVT |
| | VSS (SEQ ID NO: 715) |
| Ab 59 | QVQLVQSGAEVKKPGASVKVSCKASGYTFTGSYMHWVRQAPGQGLEWMGWINPNSGG |
| | TNYAQKFQGRVTMTRDTSISTAYMELSRLRSDDTAVYYCARGGVWYSLFDIWGQGTMV |
| | TVSS (SEQ ID NO: 717) |
| Ab 60 | QVQLVQSGAEVKKPGASVKVSCKASGYTFTGYYMHWVRQAPGQGLEWMGWINPNSGG |
| | TSYAQKFQGRVTMTRDTSISTAYMELSRLRSDDTAVYYCARASKMGDDWGQGTLVTVS |
| | S (SEQ ID NO: 719) |
| Ab 61 | QVQLVQSGAEVKKPGASVKVSCKASGYTFTSYGIHWVRQAPGQGLEWMGWISAYNGNT |
| | NYAQKLQGRVTMTTDTSTSTAYMELRSLRSDDTAVYYCARGGVPRVSYFQHWGQGTLV |
| | TVSS (SEQ ID NO: 721) |
| Ab 62 | EVQLVQSGAEVKKPGESLKISCKGSGYSFTSYWIGWVRQMPGKGLEWMGITYPGDSDTR |
| | YSPSFQGQVTISADKSISTAYLQWSSLKASDTAMYYCARAGHYDDWSGLGLDVWGQGT |
| | MVTVSS (SEQ ID NO: 723) |
| Ab 63 | QVQLVQSGAEVKKPGASVKVSCKASGYTFTSYGISWVRQAPGQGLEWMGWISTYNGNT |
| | NYAQKLQGRVTMTTDTSTSTAYMELRSLRSDDTAVYYCARGSGSGYDSWYDWGQGTL |
| | VTVSS (SEQ ID NO: 725) |
| Ab 64 | EVQLVQSGAEVKKPGESLKISCKGSGYSFTSYWIGWVRQMPGKGLEWMGITYPGDSDTR |
| | YSPSFQGQVTISADKSISTAYLQWSSLKASDTAMYYCARLGRWSSGSTAFDIWGQGTMV |
| | TVSS (SEQ ID NO: 727) |
| Ab 65 | EVQLVQSGAEVKKPGESLKISCKGSGYSFTSYWIGWVRQMPGKGLEWMGITYPGDSDTR |
| | YSPSFQGQVTISADKSISTAYLQWSSLKASDTAMYYCARLGRKPSGSVAFDIWGQGTMVT |
| | VSS (SEQ ID NO: 729) |
| Ab 66 | QVQLVQSGAEVKKPGASVKVSCKASGYTFTGSYMHWVRQAPGQGLEWMGWINPNSGG |
| | TNYAQKFQGRVTMTRDTSISTAYMELSRLRSDDTAVYYCARAGHKTHDYWGQGTLVTV |
| | SS (SEQ ID NO: 731) |
| Ab 67 | QVQLVQSGAEVKKPGASVKVSCKASGYTFTSYYMHWVRQAPGQGLEWMGIINPSGGST |
| | TYAQKFQGRVTMTRDTSTSTVYMELSSLRSEDTAVYYCARPGKSMDVWGQGTTVTVSS |
| | (SEQ ID NO: 700) |
| Ab 68 | QVQLVESGGGVVQPGRSLRLSCAASGFTFSSYGMHWVRQAPGKGLEWVALIWYDGSNK |
| | YYADSVKGRFTISRDNSKNTLYLQMNSLRAEDTAVYYCAKPGSMTDYWGQGTLVTVSS |
| | (SEQ ID NO: 734) |
| Ab 69 | QVQLVQSGAEVKKPGASVKVSCKASGYTFTGSYMHWVRQAPGQGLEWMGWINPNSGG |
| | TNYAQKFQGRVTMTRDTSISTAYMELSRLRSDDTAVYYCARAKSVDHDYWGQGTLVTV |
| | SS (SEQ ID NO: 736) |
| Ab 70 | QVQLVQSGAEVKKPGASVKVSCKASGYTFTGYYMHWVRQAPGQGLEWMGWINPNSGG |
| | TSYAQKFQGRVTMTRDTSISTAYMELSRLRSDDTAVYYCARASKMGDDWGQGTLVTVS |
| | S (SEQ ID NO: 719) |
| Ab 71 | QVQLVQSGAEVKKPGASVKVSCKASGYTFTSYYMHWVRQAPGQGLEWMGIINPSGGST |
| | SYAQKFQGRVTMTRDTSTSTVYMELSSLRSEDTAVYYCARDISTHDYDLAFDIWGQGTM |
| | VTVSS (SEQ ID NO: 739) |
| Ab 72 | QVQLQESGPGLVKPSETLSLTCTVSGGSISSYYWSWIRQPPGKGLEWIGSIYYSGSTNYNPS |
| | LKSRVTISVDTSKNQFSLKLSSVTAADTAVYYCARSGTETLFDYWGQGTLVTVSS |
| | (SEQ ID NO: 741) |
| Ab 73 | EVQLVQSGAEVKKPGESLKISCKGSGYSFTSYWIGWVRQMPGKGLEWMGITYPGDSDTT |
| | YSPSFQGQVTISADKSISTAYLQWSSLKASDTAMYYCARAKMLDDGYAFDIWGQGTMVT |
| | VSS (SEQ ID NO: 743) |
| Ab 74 | QVQLVQSGAEVKKPGASVKVSCKASGYTFTGSYMHWVRQAPGQGLEWMGWINPNSGG |
| | TNYAQKFQGRVTMTRDTSISTAYMELSRLRSDDTAVYYCARAGHKTHDYWGQGTLVTV |
| | SS (SEQ ID NO: 731) |
| Ab 75 | QVQLVQSGAEVKKPGASVKVSCKASGYTFTGYYMHWVRQAPGQGLEWMGWINPNSGG |
| | TNYAQKFQGRVTMTRDTSISTAYMELSRLRSDDTAVYYCARDLGYSSLLALDIWGQGTM |
| | VTVSS (SEQ ID NO: 746) |
| Ab 76 | EVQLVESGGGLVKPGGSLRLSCAASGFTFSSYSMNWVRQAPGKGLEWVSSISSSSSYIYY |
| | ADSVKGRFTISRDNAKNSLYLQMNSLRAEDTAVYYCARGGGRRGDNNWFDPWGQGTLV |
| | TVSS (SEQ ID NO: 748) |
| Ab 77 | QVQLVESGGGVVQPGRSLRLSCAASGFTFSSYGMHWVRQAPGKGLEWVAVISYDGSNK |
| | YYADSVKGRFTISRDNSKNTLYLQMNSLRAEDTAVYYCARGPPHEMDYWGQGTLVTVS |
| | S (SEQ ID NO: 750) |
| Ab 78 | QVQLVESGGGVVQPGRSLRLSCAASGFTFSSYGMHWVRQAPGKGLEWVAVIWYDGSNK |
| | YYADSVKGRFTISRDNSKNTLYLQMNSLRAEDTAVYYCARTPYPWIYFDLWGRGTLVTV |
| | SS (SEQ ID NO: 752) |
| Ab 79 | EVQLVESGGGLVQPGGSLRLSCAASGFTFSSYSMNWVRQAPGKGLEWVSYISGSSSTIYY |
| | ADSVKGRFTISRDNAKNSLYLQMNSLRAEDTAVYYCARGGRRHYGGMDVWGQGTTVT |
| | VSS (SEQ ID NO: 754) |
| Ab 80 | QVQLVQSGAEVKKPGSSVKVSCKASGGTFSSYAISWVRQAPGQGLEWMGGIIPIFGTANY |
| | AQKFQGRVTITADESTSTAYMELSSLRSEDTAVYYCARGGGTFWSGSWALYWGQGTLVT |
| | VSS (SEQ ID NO: 756) |
| Ab 81 | QVQLVQSGAEVKKPGSSVKVSCKASGGTFSSYAISWVRQAPGQGLEWMGGIIPIFGTANY |
| | AQKFQGRVTITADESTSTAYMELSSLRSEDTAVYYCARDSGNYDYWSGALRYWGQGTL |
| | VTVSS (SEQ ID NO: 758) |
| Ab 82 | QVQLQESGPGLVKPSQTLSLTCTVSGGSISSGGYYWSWIRQHPGKGLEWIGYIYYSGSTVY |
| | NPSLKSRVTISVDTSKNQFSLKLSSVTAADTAVYYCARVSSSWYKAWGQGTMVTVSS |
| | (SEQ ID NO: 760) |
| Ab 83 | QVQLQQWGAGLLKPSETLSLTCAVYGGSFSGYYWSWIRQPPGKGLEWIGEIDHSGSTKY |
| | NPSLKSRVTISVDTSKNQFSLKLSSVTAADTAVYYCARVGVVVGRPGYSAFDIWGQGTM |
| | VTVSS (SEQ ID NO: 762) |
| Ab 84 | QVQLVQSGAEVKKPGASVKVSCKASGYTFTSYGISWVRQAPGQGLEWMGWISTYNGNT |
| | NYAQKLQGRVTMTTDTSTSTAYMELRSLRSDDTAVYYCARGSGSGYDSWYDWGQGTL |
| | VTVSS (SEQ ID NO: 725) |
| Ab 85 | QVQLVESGGGVVQPGRSLRLSCAASGFTFSSYGMHWVRQAPGKGLEWVAVIWYDGSNK |
| | YYADSVKGRFTISRDNSKNTLYLQMNSLRAEDTAVYYCAKDLGGYYGGAAYGMDVWG |
| | QGTTVTVSS (SEQ ID NO: 765) |
| Ab 86 | QVQLVESGGGVVQPGRSLRLSCAASGFTFSSYGMHWVRQAPGKGLEWVAVISYDGSNK |
| | YYADSVKGRFTISRDNSKNTLYLQMNSLRAEDTAVYYCAKDGVYYGLGNWFDPWGQG |
| | TLVTVSS (SEQ ID NO: 767) |
| Ab 87 | QVQLQESGPGLVKPSETLSLTCTVSGGSISSYYWSWIRQPPGKGLEWIGSIYYSGSTNYNPS |
| | LKSRVTISVDTSKNQFSLKLSSVTAADTAVYYCARHGWDRVGWFDPWGQGTLVTVSS |
| | (SEQ ID NO: 769) |

TABLE C5
Light chain variable regions

| Ab ID | LC Variable Region Sequences |
|---|---|
| Ab 1 | EIVMTQSPATLSVSPGERATLSCRASQSVSSNLAWYQQKPGQAPRLLIYGASTRATGIPAR |
| | FSGSGSGTEFTLTISSLQSEDFAVYYCQQLPYWPPTFGGGTKVEIK (SEQ ID NO: 617) |
| Ab 2 | EIVLTQSPATLSVSPGERATLSCRASQSVGSNLAWYQQKPGQAPRLLIYGASTRATGIPAR |
| | FSGSGSGTEFTLTISSLQSEDFAVYYCQQYFFYPPTFGGGTKVEIK (SEQ ID NO: 619) |
| Ab 3 | DIQMTQSPSSLSASVGDRVTITCQASQDISNYLNWYQQKPGKAPKWYDASNLATGVPSR |
| | FSGSGSGTDFTFTISSLQPEDIATYYCQQPFNFPYTFGGGTKVEIK (SEQ ID NO: 621) |
| Ab 4 | EIVMTQSPATLSVSPGERATLSCRASQSVSSNLAWYQQKPGQAPRLLIYSASTRATGIPAR |
| | FSGSGSGTEFTLTISSLQSEDFAVYYCQQDHDYPFTFGGGTKVEIK (SEQ ID NO: 623) |
| Ab 5 | EIVMTQSPGTLSLSPGERATLSCRASQSVSSSYLAWYQQKPGQAPRLLIYGASSRATGIPD |
| | RFSGSGSGTDFTLTISRLEPEDFAVYYCQQYFSSPFTFGGGTKVEIK (SEQ ID NO: 625) |
| Ab 6 | EIVLTQSPATLSLSPGERATLSCRASQSVSSYLAWYQQKPGQAPRLLIYDASKRATGIPARF |
| | SGSGSGTDFTLTISSLEPEDFAVYYCQQRVNLPPTFGGGTKVEIK (SEQ ID NO: 627) |
| Ab 7 | EIVLTQSPATLSLSPGERATLSCRASQSVSSYLAWYQQKPGQAPRLLIYDASKRATGIPARF |
| | SGSGSGTDFTLTISSLEPEDFAVYYCQQRISYPITFGGGTKVEIK (SEQ ID NO: 629) |
| Ab 8 | DIQMTQSPSSLSASVGDRVTITCRASQSISSYLNWYQQKPGKAPKWYGASSLQSGVPSRF |
| | SGSGSGTDFTLTISSLQPEDFATYYCQQIDDTPITFGGGTKVEIK (SEQ ID NO: 631) |
| Ab 9 | EIVLTQSPATLSLSPGERATLSCRASQSVSSYLAWYQQKPGQAPRLLIYDASNRATGIPARF |
| | SGSGSGTDFTLTISSLEPEDFAVYYCQQFSYWPWTFGGGTKVEIK (SEQ ID NO: 633) |
| Ab 10 | EIVLTQSPGTLSLSPGERATLSCRASQSVSSSYLAWYQQKPGQAPRLLIYGASSRATGIPDR |
| | FSGSGSGTDFTLTISRLEPEDFAVYYCQQHDSSPPTFGGGTKVEIK (SEQ ID NO: 635) |
| Ab 11 | EIVLTQSPGTLSLSPGERATLSCRASQSVSSDYLAWYQQKPGQAPRLLIYGASSRATGIPDR |
| | FSGSGSGTDFTLTISRLEPEDFAVYYCQQDYSYPWTFGGGTKVEIK (SEQ ID NO: 637) |
| Ab 12 | DIQMTQSPSSLSASVGDRVTITCRASQSISSYLNWYQQKPGKAPKLLIYAASSLQSGVPSRF |
| | SGSGSGTDFTLTISSLQPEDFATYYCQQEYAVPYTFGGGTKVEIK (SEQ ID NO: 639) |
| Ab 13 | EIVLTQSPATLSLSPGERATLSCRASQSVSSYLAWYQQKPGQAPRLLIYDASNRATGIPARF |
| | SGSGSGTDFTLTISSLEPEDFAVYYCQQVSNYPITFGGGTKVEIK (SEQ ID NO: 641) |
| Ab 14 | DIQMTQSPSSLSASVGDRVTITCQASQDISNYLNWYQQKPGKAPKWYDASNLETGVPSR |
| | FSGSGSGTDFTFTISSLQPEDIATYYCQQVDNIPPTFGGGTKVEIK (SEQ ID NO: 643) |
| Ab 15 | DIQMTQSPSSLSASVGDRVTITCQASQDISNYLNWYQQKPGKAPKWYDASNLETGVPSR |
| | FSGSGSGTDFTFTISSLQPEDIATYYCQQFDTYPTFGGGTKVEIK (SEQ ID NO: 644) |
| Ab 16 | DIQMTQSPSSLSASVGDRVTITCQASQDISNYLNWYQQKPGKAPKWYDASNLETGVPSR |
| | FSGSGSGTDFTFTISSLQPEDIATYYCQQFLNFPTFGGGTKVEIK (SEQ ID NO: 646) |
| Ab 17 | DIQMTQSPSSLSASVGDRVTITCQASQDISNYLNWYQQKPGKAPKLLIYDASNLETGVPSR |
| | FSGSGSGTDFTFTISSLQPEDIATYYCQQFFNFPTFGGGTKVEIK (SEQ ID NO: 647) |
| Ab 18 | DIQMTQSPSSLSASVGDRVTITCQASQDISNYLNWYQQKPGKAPKLLIYDASNLETGVPSR |
| | FSGSGSGTDFTFTISSLQPEDIATYYCQQFIDLPFTFGGGTKVEIK (SEQ ID NO: 649) |
| Ab 19 | DIQMTQSPSSLSASVGDRVTITCQASQDISNYLNWYQQKPGKAPKLLIYDASNLETGVPSR |
| | FSGSGSGTDFTFTISSLQPEDIATYYCQQYYDLPFTFGGGTKVEIK (SEQ ID NO: 650) |
| Ab 20 | EIVLTQSPGTLSLSPGERATLSCRASQSVSSDYLAWYQQKPGQAPRLLIYGASSRATGIPDR |
| | FSGSGSGTDFTLTISRLEPEDFAVYYCQQFSSHPFTFGGGTKVEIK (SEQ ID NO: 652) |
| Ab 22 | EIVMTQSPGTLSLSPGERATLSCRASQSVSSSYLAWYQQKPGQAPRLLIYGASSRATGIPD |
| | RFSGSGSGTDFTLTISRLEPEDFAVYYCQQDDRSPYTFGGGTKVEIK (SEQ ID NO: 653) |
| Ab 23 | DIVMTQSPDSLAVSLGERATINCKSSQSVLYSSNNKNYLAWYQQKPGQPPKLLISWASTR |
| | ESGVPDRFSGSGSGTDFTLTISSLQAEDVAVYYCQQAYLPPITFGGGTKVEIK |
| | (SEQ ID NO: 655) |
| Ab 24 | DIQMTQSPSSLSASVGDRVTITCRASQSISSYLNWYQQKPGKAPKLLIYAASSLQSGVPSRF |
| | SGSGSGTDFTLTISSLQPEDFATYYCQQAFSPPPWTFGGGTKVEIK (SEQ ID NO: 657) |
| Ab 25 | EIVLTQSPGTLSLSPGERATLSCRASQSVSSSYLAWYQQKPGQAPRLLIYGASSRATGIPDR |
| | FSGSGSGTDFTLTISRLEPEDFAVYYCQQDDRSPTFGGGTKVEIK (SEQ ID NO: 659) |
| Ab 26 | EIVLTQSPATLSLSPGERATLSCRASQSVSSYLAWYQQKPGQAPRLLIYDASNRATGIPA |
| | RFSGSGSGTDFTLTISSLEPEDFAVYYCQQEFDLPFTFGGGTKVEIK (SEQ ID NO: 661) |
| Ab 27 | EIVLTQSPATLSLSPGERATLSCRASQSVSSYLAWYQQKPGQAPRLLIYDASNRATGIPARF |
| | SGSGSGTDFTLTISSLEPEDFAVYYCQQYNNFPPTFGGGTKVEIK (SEQ ID NO: 663) |
| Ab 28 | EIVLTQSPATLSLSPGERATLSCRASQSVSSYLAWYQQKPGQAPRLLIYDASKRATGIPARF |
| | SGSGSGTDFTLTISSLEPEDFAVYYCQQRYLRPITFGGGTKVEIK (SEQ ID NO: 665) |
| Ab 29 | EIVLTQSPGTLSLSPGERATLSCRASQSVSSSYLAWYQQKPGQAPRLLIYGASSRATGIPDR |
| | FSGSGSGTDFTLTISRLEPEDFAVYYCQQPGAVPTFGGGTKVEIK (SEQ ID NO: 667) |
| Ab 30 | DIQMTQSPSSLSASVGDRVTITCRASQSISSYLNWYQQKPGKAPKLLIYGAS SLQSGVPSRF |
| | SGSGSGTDFTLTISSLQPEDFATYYCQQVYITPITFGGGTKVEIK (SEQ ID NO: 669) |
| Ab 31 | DIQLTQSPSSLSASVGDRVTITCQASQDISNFLNWYQQKPGKAPKLLIYDASNLETGVPSRF |
| | SGSGSGTDFTFTISSLQPEDIATYYCQQPVDLPFTFGGGTKVEIK (SEQ ID NO: 671) |
| Ab 32 | EIVLTQSPATLSLSPGERATLSCRASQSVSSYLAWYQQKPGQAPRLLIYDASNRATGIPARF |
| | SGSGSGTDFTLTISSLEPEDFAVYYCQQYSFFPPTFGGGTKVEIK (SEQ ID NO: 673) |
| Ab 33 | EIVLTQSPATLSLSPGERATLSCRASQSVSSYLAWYQQKPGQAPRLLIYDASNRATGIPARF |
| | SGSGSGTDFTLTISSLEPEDFAVYYCQQDSSFPPTFGGGTKVEIK (SEQ ID NO: 675) |
| Ab 34 | DIQMTQSPSSLSASVGDRVTITCRASQSISSYLNWYQQKPGKAPKLLIYAASSLQSGVPSRF |
| | SGSGSGTDFTLTISSLQPEDFATYYCQQSDFPPWTFGGGTKVEIK (SEQ ID NO: 677) |
| Ab 35 | DIQMTQSPSSLSASVGDRVTITCRASQSISSYLNWYQQKPGKAPKLLIYAASSLQSGVPSRF |
| | SGSGSGTDFTLTISSLQPEDFATYYCQQGYSAPITFGGGTKVEIK (SEQ ID NO: 679) |
| Ab 36 | EIVLTQSPATLSLSPGERATLSCRASQSVSSYLAWYQQKPGQAPRLLIYDASNRATGIPARF |
| | SGSGSGTDFTLTISSLEPEDFAVYYCQQLFDWPTFGGGTKVEIK (SEQ ID NO: 681) |
| Ab 37 | EIVLTQSPATLSLSPGERATLSCRASQSVSSYLAWYQQKPGQAPRLLIYDASNRATGIPARF |
| | SGSGSGTDFTLTISSLEPEDFAVYYCQQRAFLFTFGGGTKVEIK (SEQ ID NO: 683) |
| Ab 38 | EIVLTQSPATLSLSPGERATLSCRASQSVSSYLAWYQQKPGQAPRLLIYDASNRATGIPARF |
| | SGSGSGTDFTLTISSLEPEDFAVYYCQQIDFLPYTFGGGTKVEIK (SEQ ID NO: 685) |
| Ab 39 | DIQMTQSPSSLSASVGDRVTITCRASQSISSYLNWYQQKPGKAPKLLIYAASSLQSGVPSRF |
| | SGSGSGTDFTLTISSLQPEDFATYYCQQVYSPPITFGGGTKVEIK (SEQ ID NO: 687) |
| Ab 40 | DIQMTQSPSSLSASVGDRVTITCRASQSISSYLNWYQQKPGKAPKLLIYAASSLQSGVPSRF |
| | SGSGSGTDFTLTISSLQPEDFATYYCQQGYAAPITFGGGTKVEIK (SEQ ID NO: 688) |
| Ab 41 | EIVLTQSPATLSLSPGERATLSCRASQSVSSYLAWYQQKPGQAPRLLIYDASNRATGIPARF |
| | SGSGSGTDFTLTISSLEPEDFTVYYCQQRYALPITFGGGTKVEIK (SEQ ID NO: 690) |
| Ab 42 | EIVLTQSPGTLSLSPGERATLSCRASQSVSSSYLAWYQQKPGQAPRLLIYGASSRATGIPDR |
| | FSGSGSGTDFTLTISRLEPEDFAVYYCQQYASPPITFGGGTKVEIK (SEQ ID NO: 692) |
| Ab 43 | DIQMTQSPSSLSASVGDRVTITCRASQSISRYLNWYQQKPGKAPKLLIYAASSLQSGVPSRF |
| | SGSGSGTDFTLTISSLQPEDFATYYCQQVYSTPITFGGGTKVEIK (SEQ ID NO: 694) |
| Ab 44 | EIVMTQSPATLSLSPGERATLSCRASQSVSSYLAWYQQKPGQAPRLLIYDSSNRATGIPAR |
| | FSGSGSGTDFTLTISSLEPEDFAVYYCQQLVHWPTFGGGTKVEIK (SEQ ID NO: 695) |
| Ab 45 | EIVMTQSPATLSVSPGERATLSCRASQSVSSNLAWYQQKPGQAPRLLIYGASTRATGIPAR |
| | FSGSGSGTEFTLTISSLQSEDFAVYYCQQLDDWFTFGGGTKVEIK (SEQ ID NO: 697) |
| Ab 46 | EIVLTQSPATLSLSPGERATLSCRASQSVSSYLAWYQQKPGQAPRLLIYDSSNRATGIPARF |
| | SGSGSGTDFTLTISSLEPEDFAVYYCQQRSNYPITFGGGTKVEIK (SEQ ID NO: 699) |
| Ab 47 | EIVLTQSPGTLSLSPGERATLSCRASQSVSSYLAWYQQKPGQAPRLLIYDASNRATGIPARF |
| | SGSGSGTDFTLTISSLEPEDFAVYYCQQRILYPITFGGGTKVEIK (SEQ ID NO: 701) |
| Ab 48 | EIVLTQSPATLSLSPGERATLSCRASQSVSSYLAWYQQKPGQAPRLLIYDASNRATGIPARF |
| | SGSGSGTDFTLTISSLEPEDFAVYYCQQRAAYPITFGGGTKVEIK (SEQ ID NO: 702) |
| Ab 49 | EIVLTQSPATLSLSPGERATLSCRASQSVSSYLAWYQQKPGQAPRLLIYDASKRATGIPARF |
| | SGSGSGTDFTLTISSLEPEDFAVYYCQQRTSHPITFGGGTKVEIK (SEQ ID NO: 703) |
| Ab 50 | EIVLTQSPGTLSLSPGERATLSCRASQSVSSSYLAWYQQKPGQAPRLLIYGASSRATGIPDR |
| | FSGSGSGTDFTLTISRLEPEDFAVYYCQQYAGSPFTFGGGTKVEIK (SEQ ID NO: 704) |
| Ab 51 | DIQMTQSPSSLSASVGDRVTITCRASQSISSYLNWYQQKPGKAPKLLIYAASSLQSGVPSRF |
| | SGSGSGTDFTLTISSLQPEDFATYYCQQFDDVFTFGGGTKVEIK (SEQ ID NO: 706) |
| Ab 53 | EIVLTQSPGTLSLSPGERATLSCRASQSVSSSYLAWYQQKPGQAPRLLIYGASSRATGIPDR |
| | FSGSGSGTDFTLTISRLEPEDFAVYYCQQYVNSPFTFGGGTKVEIK (SEQ ID NO: 707) |
| Ab 54 | DIQMTQSPSSLSASVGDRVTITCRASQSINSYLNWYQQKPGKAPKLLIYAASSLQSGVPSR |
| | FSGSGSGTDFTLTISSLQPEDFATYYCQQSDDDPFTFGGGTKVEIK (SEQ ID NO: 708) |
| Ab 55 | EIVLTQSPATLSLSPGERATLSCRASQSVSSYLAWYQQKPGQAPRLLIYDASNRATGIPARF |
| | SGSGSGTDFTLTISSLEPEDFAVYYCQQLSTYPLTFGGGTKVEIK (SEQ ID NO: 710) |
| Ab 56 | EIVMTQSPATLSLSPGERATLSCRASQSVSSYLAWYQQKPGQAPRLLIYDASNRATGIPAR |
| | FSGSGSGTDFTLTISSLEPEDFAVYYCQQRSVYPITFGGGTKVEIK (SEQ ID NO: 712) |
| Ab 57 | EIVLTQSPATLSLSPGERATLSCRASQSVSSYLAWYQQKPGQAPRLLIYDASKRATGIPARF |
| | SGSGSGTDFTLTISSLEPEDFAVYYCQQVSLFPLTFGGGTKVEIK (SEQ ID NO: 714) |
| Ab 58 | DIQMTQSPSTLSASVGDRVTITCRASQSISSWLAWYQQKPGKAPKWYDASSLESGVPSR |
| | FSGSGSGTEFTLTISSLQPDDFATYYCLDYNSYSPITFGGGTKVEIK (SEQ ID NO: 716) |
| Ab 59 | DIQMTQSPSSLSASVGDRVTITCQASQDISNYLNWYQQKPGKAPKLLIYDASNLETGVPSR |
| | FSGSGSGTDFTFTISSLQPEDIATYYCQQHIALPFTFGGGTKVEIK (SEQ ID NO: 718) |
| Ab 60 | EIVLTQSPATLSLSPGERATLSCRASQSVSSYLAWYQQKPGQAPRLLIYDASKRATGIPARF |
| | SGSGSGTDFTLTISSLEPEDFAVYYCQQRASMPITFGGGTKVEIK (SEQ ID NO: 720) |
| Ab 61 | EIVLTQSPATLSLSPGERATLSCRASQSVSSYLAWYQQKPGQAPRLLIYDSSNRATGIPARF |
| | SGSGSGTDFTLTISSLEPEDFAVYYCQQAFNRPPTFGGGTKVEIK (SEQ ID NO: 722) |
| Ab 62 | EIVLTQSPATLSLSPGERATLSCRASQSVSSYLAWYQQKPGQAPRLLIYDASKRATGIPARF |
| | SGSGSGTDFTLTISSLEPEDFAVYYCQQSSVHPYTFGGGTKVEIK (SEQ ID NO: 724) |
| Ab 63 | DIQMTQSPSSVSASVGDRVTITCRASQGIDSWLAWYQQKPGKAPKLLIYAASSLQSGVPSR |
| | FSGSGSGTDFTLTISSLQPEDFATYYCQQAYSLPPTFGGGTKVEIK (SEQ ID NO: 726) |
| Ab 64 | EIVMTQSPATLSVSPGERATLSCRASQSVSSNLAWYQQKPGQAPRLLIYGASTRATGIPAR |
| | FSGSGSGTEFTLTISSLQSEDFAVYYCQQDDDGYTFGGGTKVEIK (SEQ ID NO: 728) |
| Ab 65 | EIVLTQSPATLSLSPGERATLSCRASQSVSSYLAWYQQKPGQAPRLLIYDASNRATGIPARF |
| | SGSGSGTDFTLTISSLEPEDFAVYYCQQDYSWPYTFGGGTKVEIK (SEQ ID NO: 730) |
| Ab 66 | EIVLTQSPGTLSLSPGERATLSCRASQSVSSYLAWYQQKPGQAPRLLIYDASNRATGIPARF |
| | SGSGSGTDFTLTISSLEPEDFAVYYCQQRSAYPITFGGGTKVEIK (SEQ ID NO: 732) |
| Ab 67 | EIVLTQSPATLSLSPGERATLSCRASQSVSSYLAWYQQKPGQAPRLLIYDASNRATGIPARF |
| | SGSGSGTDFTLTISSLEPEDFAVYYCQQRSHFPITFGGGTKVEIK (SEQ ID NO: 733) |
| Ab 68 | EIVLTQSPATLSLSPGERATLSCRASQSVSSYLAWYQQKPGQAPRLLIYDASNRATGIPARF |
| | SGSGSGTDFTLTISSLEPEDFAVYYCQQRANYPITFGGGTKVEIK (SEQ ID NO: 735) |
| Ab 69 | EIVLTQSPATLSLSPGERATLSCRASQSVSSYLAWYQQKPGQAPRLLIYDASNRATGIPARF |
| | SGSGSGTDFTLTISSLEPEDFAVYYCQQRADYPITFGGGTKVEIK (SEQ ID NO: 737) |
| Ab 70 | EIVLTQSPATLSLSPGERATLSCRASQSVSSYLAWYQQKPGQAPRLLIYDASNRATGIPARF |
| | SGSGSGTDFTLTISSLEPEDFAVYYCQQRSVYPITFGGGTKVEIK (SEQ ID NO: 738) |
| Ab 71 | EIVMTQSPGTLSLSPGERATLSCRASQSVSSSYLAWYQQKPGQAPRLLIYGASNRATGIPD |
| | RFSGSGSGTDFTLTISRLEPEDFAVYYCQQAGSHPFTFGGGTKVEIK (SEQ ID NO: 740) |
| Ab 72 | DIQMTQSPSSLSASVGDRVTITCQASQDITNYLNWYQQKPGKAPKWYDASNLETGVPSR |
| | FSGSRSGTDFTFTISSLQPEDIATYYCQQDVNYPPTFGGGTKVEIK (SEQ ID NO: 742) |
| Ab 73 | EIVMTQSPATLSVSPGERATLSCRASQSVSSNLAWYQQKPGQAPRLLIYGASTRATGIPAR |
| | FSGSGSGTEFTLTISSLQSEDFAVYYCQQDDNYPYTFGGGTKVEIK (SEQ ID NO: 744) |
| Ab 74 | EIVLTQSPATLSLSPGERATLSCRASQSVSSYLAWYQQKPGQAPRLLIYDASNRATGIPARF |
| | SGSGSGTDFTLTISSLEPEDFAVYYCQQRSTFPITFGGGTKVEIK (SEQ ID NO: 745) |
| Ab 75 | EIVLTQSPATLSLSPGERATLSCRASQSVSSYLAWYQQKPGQAPRLLIYDASNRATGIPARF |
| | SGSGSGTDFTLTISSLEPEDFAVYYCQQVSNYPFTFGGGTKVEIK (SEQ ID NO: 747) |
| Ab 76 | DIVMTQSPDSLAVSLGERATINCKSSQSVLYSSNNKNYLAWYQQKPGQPPKLLIYWASTR |
| | ESGVPDRFSGSGSGTDFTLTISSLQAEDVAVYYCQQYHDAPITFGGGTKVEIK |
| | (SEQ ID NO: 749) |
| Ab 77 | DIVMTQSPDSLAVSLGERATINCKSSQSVLYSSNNKNYLAWYQQKPGQPPKLLIYWASTR |
| | ESGVPDRFSGSGSGTDFTLTISSLQAEDVAVYYCQQAYVVPPTFGGGTKVEIK |
| | (SEQ ID NO: 751) |
| Ab 78 | EIVLTQSPATLSLSPGERATLSCRASQSVSSYLAWYQQKPGQAPRLLIYDASNRATGIPARF |
| | SGSGSGTDFTLTISSLEPEDFAVYYCQQADNWPFTFGGGTKVEIK (SEQ ID NO: 753) |
| Ab 79 | DIVMTQSPLSLPVTPGEPASISCRSSQSLLHSNGYNYLDWYLQKPGQSPQLLIYLGSHRAS |
| | GVPDRFSGSGSGTDFTLKISRVEAEDVGVYYCMQALESPRTFGGGTKVEIK |
| | (SEQ ID NO: 755) |
| Ab 80 | EIVLTQSPATLSLSPGERATLSCRASQSVSSYLAWYQQKPGQAPRLLIYDASNRATGIPARF |
| | SGSGSGTDFTLTISSLEPEDFAVYYCQQYVNWPFTFGGGTKVEIK (SEQ ID NO: 757) |
| Ab 81 | EIVLTQSPATLSLSPGERATLSCRASQSVSSYLAWYQQKPGQAPRLLIYDASNRATGIPARF |
| | SGSGSGTDFTLTISSLEPEDFAVYYCQQSSNWPWTFGGGTKVEIK (SEQ ID NO: 759) |
| Ab 82 | DIQMTQSPSSVSASVGDRVTITCRASQGISSWLAWYQQKPGKAPKLLIYAASSLQSGVPSR |
| | FSGSGSGTDFTLTISSLQPEDFATYYCQQASTFPITFGGGTKVEIK (SEQ ID NO: 761) |
| Ab 83 | DIQMTQSPSSVSASVGDRVTITCRASQGISSWLAWYQQKPGKAPKLLIYAASSLQSGVPSR |
| | FSGSGSGTDFTLTISSLQPEDFATYYCQQRNSLPLTFGGGTKVEIK (SEQ ID NO: 763) |
| Ab 84 | DIQMTQSPSSLSASVGDRVTITCRASQSISSYLNWYQQKPGKAPKLLIYAASSLQSGVPSRF |
| | SGSGSGTDFTLTISSLQPEDFATYYCQQSYDFPITFGGGTKVEIK (SEQ ID NO: 764) |
| Ab 85 | DIQLTQSPSSVSASVGDRVTITCRASQDISSWLAWYQQKPGKAPKLLIYAASSLQSGVPSR |
| | FSGSGSGTDFTLTISSLQPEDFATYYCQQEVDYPPLTFGGGTKVEIK (SEQ ID NO: 766) |
| Ab 86 | DIQMTQSPSTLSASVGDRVTITCRASQSISSWLAWYQQKPGKAPKWYKASSLESGVPSR |
| | FSGSGSGTEFTLTISSLQPDDFATYYCQQLNSYSPTFGGGTKVEIK (SEQ ID NO: 768) |
| Ab 87 | EIVLTQSPATLSLSPGERATLSCRASQSVSRYLAWYQQKPGQAPRLLIYDASNRATGIPAR |
| | FSGSGSGTDFTLTISSLEPEDFAVYYCQQYIFWPPTFGGGTKVEIK (SEQ ID NO: 770) |

[0323] In some embodiments, anti-TREM2 antibodies of the present disclosure comprise (a) a heavy chain variable region comprising at least one, two, or three HVRs selected from HVR-H1, HVR-H2, and HVR-H3 of any one of the antibodies listed in TABLE C3 or selected from Ab1, Ab2, Ab3, Ab4, Ab5, Ab6, Ab7, Ab8, Ab9, Ab100, Ab111, Ab12, Ab13, Ab14, Ab15, Ab16, Ab17, Ab18, Ab19, Ab20, Ab2l, Ab22, Ab23, Ab24, Ab25, Ab26, Ab27, Ab28, Ab29, Ab30, Ab31, Ab32, Ab33, Ab34, Ab35, Ab36, Ab37, Ab38, Ab39, Ab4, Ab4l, Ab42, Ab43, Ab44, Ab45, Ab46, Ab47, Ab48, Ab49, Ab50, Ab51, Ab52, Ab53, Ab54, Ab55, Ab56, Ab57, Ab58, Ab59, Ab60, Ab6l, Ab62, Ab63, Ab64, Ab65, Ab66, Ab67, Ab68, Ab69, Ab70, Ab71, Ab72, Ab73, Ab74, Ab75, Ab76, Ab77, Ab78, Ab79, AbM, Ab81, Ab82, Ab83, Ab84, Ab85, Ab86, and Ab87; and/or (b) a light chain variable region comprising at least one, two, or three HVRs selected from HVR-L1, HVR-L2, and HVR-L3 of any one of the antibodies selected from Ab1, Ab2, Ab3, Ab4, Ab5, Ab6, Ab7, Ab8, Ab9, Ab100, Ab11, Ab12, Ab13, Ab14, Ab15, Ab16, Ab17, Ab18, Ab19, Ab20, Ab2l, Ab22, Ab23, Ab24, Ab25, Ab26, Ab27, Ab28, Ab29, Ab30, Ab3l, Ab32, Ab33, Ab34, Ab35, Ab36, Ab37, Ab38, Ab39, Ab4, Ab4l, Ab42, Ab43, Ab44, Ab45, Ab46, Ab47, Ab48, Ab49, Ab50, Ab51, Ab52, Ab53, Ab54, Ab55, Ab56, Ab57, Ab58, Ab59, Ab60, Ab6l, Ab62, Ab63, Ab64, Ab65, Ab66, Ab67, Ab68, Ab69, Ab70, Ab7l, Ab72, Ab73, Ab74, Ab75, Ab76, Ab77, Ab78, Ab79, Ab80, Ab81, Ab82, Ab83, Ab84, Ab85, Ab86, and Ab87.

[0324] In some embodiments, the anti-TREM2 antibody comprises a light chain variable domain and a heavy chain variable region, wherein the light chain variable region comprises a HVR-L1, HVR-L2, and HVR-L3, and the heavy chain variable domain comprises a HVR-H1, HVR-H2, and HVR-H3 of an antibody listed in TABLE C3 or selected from the group consisting of: Ab1, Ab2, Ab3, Ab4, Ab5, Ab6, Ab7, Ab8, Ab9, Ab10, Ab11, Ab12, Ab13, Ab14, Ab15, Ab16, Ab17, Ab18, Ab19, Ab20, Ab21, Ab22, Ab23, Ab24, Ab25, Ab26, Ab27, Ab28, Ab29, Ab30, Ab31, Ab32, Ab33, Ab34, Ab35, Ab36, Ab37, Ab38, Ab39, Ab40, Ab41, Ab42, Ab43, Ab44, Ab45, Ab46, Ab47, Ab48, Ab49, Ab50, Ab51, Ab52, Ab53, Ab54, Ab55, Ab56, Ab57, Ab58, Ab59, Ab60, Ab61, Ab62, Ab63, Ab64, Ab65, Ab66, Ab67, Ab68, Ab69, Ab70, Ab71, Ab72, Ab73, Ab74, Ab75, Ab76, Ab77, Ab78, Ab79, Ab80, Ab81, Ab82, Ab83, Ab84, Ab85, Ab86, and Ab87.

[0325] In some embodiments, an anti-human TREM2 antibody is an antibody which competes with a monoclonal antibody selected from the group consisting of: Ab1, Ab2, Ab3, Ab4, Ab5, Ab6, Ab7, Ab8, Ab9, Ab10, A11, Ab12, Ab13, Ab14, Ab15, Ab16, Ab17, Ab18, Ab19, Ab20, Ab21, Ab22, Ab23, Ab24, Ab25, Ab26, Ab27, Ab28, Ab29, Ab30, Ab31, Ab32, Ab33, Ab34, Ab35, Ab36, Ab37, Ab38, Ab39, Ab40, Ab41, Ab42, Ab43, Ab44, Ab45, Ab46, Ab47, Ab48, Ab49, Ab50, Ab51, Ab52, Ab53, Ab54, Ab55, Ab56, Ab57, Ab58, Ab59, Ab60, Ab61, Ab62, Ab63, Ab64, Ab65, Ab66, Ab67, Ab68, Ab69, Ab70, Ab71, Ab72, Ab73, Ab74, Ab75, Ab76, Ab77, Ab78, Ab79, Ab80, Ab81, Ab82, Ab83, Ab84, Ab85, Ab86, and Ab87 for binding to TREM2.

[0326] In some embodiments, each of the light chain variable regions disclosed in TABLE C5 and each of the heavy chain variable regions disclosed in TABLE C4 may be attached to the light chain constant regions (EN1) and heavy chain constant regions (EN2) to form complete antibody light and heavy chains, respectively, as further discussed below. Further, each of the generated heavy and light chain sequences may be combined to form a complete antibody structure. It should be understood that the heavy chain and light chain variable regions provided herein can also be attached to other constant domains having different sequences than the exemplary sequences listed herein.

D. PCT Patent Application Publication No. WO2017/062672A1

[0327] In some embodiments, the TREM2 agonist is an antibody or an antigen-binding fragment thereof, as described in PCT Patent Application Publication No. WO2017/062672A1 (“the '672 application”), which is incorporated by reference herein, in its entirety.

[0328] In some embodiments, the TREM2 binding agent comprises an antibody that comprises a light chain variable domain comprising a CDRL1, CDRL2, and CDRL3 (also referred to as HVR-L1, HVR-L2, and HVR-L3, respectively), and a heavy chain variable domain comprising a CDRH1, CDRH2, and CDRH3 (also referred to as HVR-H1, HVR-H2, and HVR-H3, respectively) disclosed in the '672 application specification. In some embodiments, the TREM2 binding agent comprises an antibody that comprises a light chain variable domain and a heavy chain variable domain disclosed in the '672 application specification.

[0329] In some embodiments, the antibody comprises a light chain variable domain and a heavy chain variable domain, wherein the light chain variable domain, or the heavy chain variable domain, or both comprise at least one, two, three, four, five, or six HVRs selected from HVR-L1, HVR-L2, HVR-L3, HVR-H1, HVR-H2, and HVR-H3 such that: (a) the HVR-L1 comprises an amino acid sequence selected from the group consisting of SEQ ID NOS:829-843, 1401, 1510-1514, 1554-1558, and 1646-1648; (b) the HVR-L2 comprises an amino acid sequence selected from the group consisting of SEQ ID NOS:844-853, 1515-1517, and 1559-1563; (c) the HVR-L3 comprises an amino acid sequence selected from the group consisting of SEQ ID NOS:854-867, 1402, 1403, 1518-1522, and 1564-1566; (d) the HVR-H1 comprises an amino acid sequence selected from the group consisting of SEQ ID NOS:868-885, 1404, 1523-1525, 1567-1574, and 1649-1655; (e) the HVR-H2 comprises an amino acid sequence selected from the group consisting of SEQ ID NOS:886-904, 1405-1407, 1526-1528, 1575-1582, 1656-1662, and 1708; or (f) the HVR-H3 comprises an amino acid sequence selected from the group consisting of SEQ ID NOS:905-992, 1408, 1409, 1529, 1530, and 1583-1590. In some embodiments: (a) the HVR-L1 comprises the amino acid sequence of SEQ ID NO:831, the HVR-L2 comprises the amino acid sequence of SEQ ID NO:846, the HVR-L3 comprises the amino acid sequence of SEQ ID NO:856, the HVR-H1 comprises the amino acid sequence of SEQ ID NO:871, the HVR-H2 comprises the amino acid sequence of SEQ ID NO:889, and the HVR-H3 comprises the amino acid sequence of SEQ ID NO:908; (b) the HVR-L1 comprises the amino acid sequence of SEQ ID NO:834, the HVR-L2 comprises the amino acid sequence of SEQ ID NO:848, the HVR-L3 comprises the amino acid sequence of SEQ ID NO:859, the HVR-H1 comprises the amino acid sequence of SEQ ID NO:873, the HVR-H2 comprises the amino acid sequence of SEQ ID NO:891, and the HVR-H3 comprises the amino acid sequence of SEQ ID NO:910; (c) the HVR-L1 comprises the amino acid sequence of SEQ ID NO:831, the HVR-L2 comprises the amino acid sequence of SEQ ID NO:846, the HVR-L3 comprises the amino acid sequence of SEQ ID NO:856, the HVR-H1 comprises the amino acid sequence of SEQ ID NO:871, the HVR-H2 comprises the amino acid sequence of SEQ ID NO:889, and the HVR-H3 comprises the amino acid sequence of SEQ ID NO:908; (d) the HVR-L1 comprises the amino acid sequence of SEQ ID NO:836, the HVR-L2 comprises the amino acid sequence of SEQ ID NO:849, the HVR-L3 comprises the amino acid sequence of SEQ ID NO:855, the HVR-H1 comprises the amino acid sequence of SEQ ID NO:875, the HVR-H2 comprises the amino acid sequence of SEQ ID NO:893, and the HVR-H3 comprises the amino acid sequence of SEQ ID NO:912; (e) the HVR-H1 comprises the amino acid sequence of SEQ ID NO:978, the HVR-H2 comprises the amino acid sequence of SEQ ID NO:896, and the HVR-H3 comprises the amino acid sequence of SEQ ID NO:915; (f) the HVR-L1 comprises the amino acid sequence of SEQ ID NO:839, the HVR-L2 comprises the amino acid sequence of SEQ ID NO:848, the HVR-L3 comprises the amino acid sequence of SEQ ID NO:863, the HVR-H1 comprises the amino acid sequence of SEQ ID NO:880, the HVR-H2 comprises the amino acid sequence of SEQ ID NO:898, and the HVR-H3 comprises the amino acid sequence of SEQ ID NO:917; (g) the HVR-L1 comprises the amino acid sequence of SEQ ID NO:840, the HVR-L2 comprises the amino acid sequence of SEQ ID NO:848, the HVR-L3 comprises the amino acid sequence of SEQ ID NO:868, the HVR-H1 comprises the amino acid sequence of SEQ ID NO:881, the HVR-H2 comprises the amino acid sequence of SEQ ID NO:899, and the HVR-H3 comprises the amino acid sequence of SEQ ID NO:918; (h) the HVR-L1 comprises the amino acid sequence of SEQ ID NO:841, the HVR-L2 comprises the amino acid sequence of SEQ ID NO:852, the HVR-L3 comprises the amino acid sequence of SEQ ID NO:865, the HVR-H1 comprises the amino acid sequence of SEQ ID NO:882, the HVR-H2 comprises the amino acid sequence of SEQ ID NO:900, and the HVR-H3 comprises the amino acid sequence of SEQ ID NO:919; (i) the HVR-L1 comprises the amino acid sequence of SEQ ID NO:842, the HVR-L2 comprises the amino acid sequence of SEQ ID NO:849, the HVR-L3 comprises the amino acid sequence of SEQ ID NO:866, the HVR-H1 comprises the amino acid sequence of SEQ ID NO:883, the HVR-H2 comprises the amino acid sequence of SEQ ID NO:902, and the HVR-H3 comprises the amino acid sequence of SEQ ID NO:920; or (j) the HVR-L1 comprises the amino acid sequence of SEQ ID NO:936, the HVR-L2 comprises the amino acid sequence of SEQ ID NO:849, the HVR-L3 comprises the amino acid sequence of SEQ ID NO:855, the HVR-H1 comprises the amino acid sequence of SEQ ID NO:885, the HVR-H2 comprises the amino acid sequence of SEQ ID NO:904, and the HVR-H3 comprises the amino acid sequence of SEQ ID NO:922. In some embodiments, the antibody comprises a light chain variable domain and a heavy chain variable domain, wherein the light chain variable domain comprises: (a) an HVR-L1 comprising an amino acid sequence selected from the group consisting of SEQ ID NOS:829-843, 1401, 1510-1514, 1554-1558, and 1646-1648, or an amino acid sequence with at least about 90% homology to an amino acid sequence selected from the group consisting of SEQ ID NOS:829-843, 1401, 1510-1514, 1554-1558, and 1646-1648; (b) an HVR-L2 comprising an amino acid sequence selected from the group consisting of SEQ ID NOS:844-853, 1515-1517, and 1559-1563, or an amino acid sequence with at least about 90% homology to an amino acid sequence selected from the group consisting of SEQ ID NOS:844-853, 1515-1517, and 1559-1563; and (c) an HVR-L3 comprising an amino acid sequence selected from the group consisting of SEQ ID NOS:854-867, 1402, 1403, 1518-1522, and 1564-1566, or an amino acid sequence with at least about 90% homology to an amino acid sequence selected from the group consisting of SEQ ID NOS:854-867, 1402, 1403, 1518-1522, and 1564-1566; and wherein the heavy chain variable domain comprises: (a) an HVR-H1 comprising an amino acid sequence selected from the group consisting of SEQ ID NOS:868-885, 1404, 1523-1525, 1567-1574, and 1649-1655, or an amino acid sequence with at least about 90% homology to an amino acid sequence selected from the group consisting of SEQ ID NOS:868-885, 1404, 1523-1525, 1567-1574, and 1649-1655; (b) an HVR-H2 comprising an amino acid sequence selected from the group consisting of SEQ ID NOS:886-904, 1405-1407, 1526-1528, 1575-1582, 1656-1662, and 1708, or an amino acid sequence with at least about 90% homology to an amino acid sequence selected from the group consisting of SEQ ID NOS:886-904, 1405-1407, 1526-1528, 1575-1582, 1656-1662, and 1708; and (c) an HVR-H3 comprising an amino acid sequence selected from the group consisting of SEQ ID NOS:905-992, 1408, 1409, 1529, 1530, and 1583-1590, or an amino acid sequence with at least about 90% homology to an amino acid sequence selected from the group consisting of SEQ ID NOS:905-992, 1408, 1409, 1529, 1530, and 1583-1590. In some embodiments, the antibody comprises a light chain variable domain comprising an amino acid sequence selected from the group consisting of SEQ ID NOS: 1039-1218, 1422-1454, 1499-1509, 1544-1550, 1629-1636, 1641, 1643, 1664, 1669, and 1670; and/or a heavy chain variable domain comprising an amino acid sequence selected from the group consisting of SEQ ID NOS:1219-1400, 1455-1498, 1551-1553, and 1637-1640, 1642-1645, and 1665-1667.

[0330] In some embodiments, the antibody comprises a light chain variable domain and a heavy chain variable domain, wherein: (a) the light chain variable domain comprises the amino acid sequence of SEQ ID NO: 1153 and the heavy chain variable domain comprises the amino acid sequence of SEQ ID NO:1341; (b) the light chain variable domain comprises the amino acid sequence of SEQ ID NO: 1670 and the heavy chain variable domain comprises the amino acid sequence of SEQ ID NO: 1341; (c) the light chain variable domain comprises the amino acid sequence of SEQ ID NO:1154 and the heavy chain variable domain comprises the amino acid sequence of SEQ ID NO: 1342; (d) the light chain variable domain comprises the amino acid sequence of SEQ ID NO: 1155 and the heavy chain variable domain comprises the amino acid sequence of SEQ ID NO: 1343; (e) the light chain variable domain comprises the amino acid sequence of SEQ ID NO: 1156 and the heavy chain variable domain comprises the amino acid sequence of SEQ ID NO: 1344; (f) the light chain variable domain comprises the amino acid sequence of SEQ ID NO: 1157 and the heavy chain variable domain comprises the amino acid sequence of SEQ ID NO: 1345; (g) the light chain variable domain comprises the amino acid sequence of SEQ ID NO: 1158 and the heavy chain variable domain comprises the amino acid sequence of SEQ ID NO: 1346; (h) the light chain variable domain comprises the amino acid sequence of SEQ ID NO: 1159 and the heavy chain variable domain comprises the amino acid sequence of SEQ ID NO: 1346; (i) the light chain variable domain comprises the amino acid sequence of SEQ ID NO: 1160 and the heavy chain variable domain comprises the amino acid sequence of SEQ ID NO: 1347; (j) the light chain variable domain comprises the amino acid sequence of SEQ ID NO: 1161 and the heavy chain variable domain comprises the amino acid sequence of SEQ ID NO: 1348; (k) the light chain variable domain comprises the amino acid sequence of SEQ ID NO: 1162 and the heavy chain variable domain comprises the amino acid sequence of SEQ ID NO: 1349; (l) the light chain variable domain comprises the amino acid sequence of SEQ ID NO: 1163 and the heavy chain variable domain comprises the amino acid sequence of SEQ ID NO: 1350; (m) the light chain variable domain comprises the amino acid sequence of SEQ ID NO: 1663 and the heavy chain variable domain comprises the amino acid sequence of SEQ ID NO: 1665; (n) the light chain variable domain comprises the amino acid sequence of SEQ ID NO: 1664 and the heavy chain variable domain comprises the amino acid sequence of SEQ ID NO: 1666; (o) the light chain variable domain comprises the amino acid sequence of SEQ ID NO: 1664 and the heavy chain variable domain comprises the amino acid sequence of SEQ ID NO: 1667; (p) the light chain variable domain comprises the amino acid sequence of SEQ ID NO: 1039 and the heavy chain variable domain comprises the amino acid sequence of SEQ ID NO: 1219; (q) the light chain variable domain comprises the amino acid sequence of SEQ ID NO: 1050 and the heavy chain variable domain comprises the amino acid sequence of SEQ ID NO: 1229; (r) the light chain variable domain comprises the amino acid sequence of SEQ ID NO: 1072 and the heavy chain variable domain comprises the amino acid sequence of SEQ ID NO: 1239; (s) the light chain variable domain comprises the amino acid sequence of SEQ ID NO: 1061 and the heavy chain variable domain comprises the amino acid sequence of SEQ ID NO: 1249; (t) the light chain variable domain comprises the amino acid sequence of SEQ ID NO: 1669 and the heavy chain variable domain comprises the amino acid sequence of SEQ ID NO: 1249; (u) the light chain variable domain comprises the amino acid sequence of SEQ ID NO: 1083 and the heavy chain variable domain comprises the amino acid sequence of SEQ ID NO: 1259; (v) the light chain variable domain comprises the amino acid sequence of SEQ ID NO: 1094 and the heavy chain variable domain comprises the amino acid sequence of SEQ ID NO: 1269; (w) the light chain variable domain comprises the amino acid sequence of SEQ ID NO: 1105 and the heavy chain variable domain comprises the amino acid sequence of SEQ ID NO: 1279; (x) the light chain variable domain comprises the amino acid sequence of SEQ ID NO: 1106 and the heavy chain variable domain comprises the amino acid sequence of SEQ ID NO: 1280; (y) the light chain variable domain comprises the amino acid sequence of SEQ ID NO: 1107 and the heavy chain variable domain comprises the amino acid sequence of SEQ ID NO:1281; (z) the light chain variable domain comprises the amino acid sequence of SEQ ID NO: 1118 and the heavy chain variable domain comprises the amino acid sequence of SEQ ID NO: 1249; (aa) the light chain variable domain comprises the amino acid sequence of SEQ ID NO: 1119 and the heavy chain variable domain comprises the amino acid sequence of SEQ ID NO:1291; (bb) the light chain variable domain comprises the amino acid sequence of SEQ ID NO: 1130 and the heavy chain variable domain comprises the amino acid sequence of SEQ ID NO:1281; (cc) the light chain variable domain comprises the amino acid sequence of SEQ ID NO: 1499 and the heavy chain variable domain comprises the amino acid sequence of SEQ ID NO:1301; (dd) the light chain variable domain comprises the amino acid sequence of SEQ ID NO:1131 and the heavy chain variable domain comprises the amino acid sequence of SEQ ID NO: 1311; (ee) the light chain variable domain comprises the amino acid sequence of SEQ ID NO: 1142 and the heavy chain variable domain comprises the amino acid sequence of SEQ ID NO:1331; (ff) the light chain variable domain comprises the amino acid sequence of SEQ ID NO: 1164 and the heavy chain variable domain comprises the amino acid sequence of SEQ ID NO:1351; (gg) the light chain variable domain comprises the amino acid sequence of SEQ ID NO: 1175 and the heavy chain variable domain comprises the amino acid sequence of SEQ ID NO:1455; (hh) the light chain variable domain comprises the amino acid sequence of SEQ ID NO:1185 and the heavy chain variable domain comprises the amino acid sequence of SEQ ID NO:1361; (ii) the light chain variable domain comprises the amino acid sequence of SEQ ID NO: 1216 and the heavy chain variable domain comprises the amino acid sequence of SEQ ID NO:1371; (jj) the light chain variable domain comprises the amino acid sequence of SEQ ID NO: 1217 and the heavy chain variable domain comprises the amino acid sequence of SEQ ID NO:1381; (kk) the light chain variable domain comprises the amino acid sequence of SEQ ID NO: 1218 and the heavy chain variable domain comprises the amino acid sequence of SEQ ID NO: 1391; (ll) the light chain variable domain comprises the amino acid sequence of SEQ ID NO: 1544 and the heavy chain variable domain comprises the amino acid sequence of SEQ ID NO:1551; (mm) the light chain variable domain comprises the amino acid sequence of SEQ ID NO: 1629 and the heavy chain variable domain comprises the amino acid sequence of SEQ ID NO:1551; (nn) the light chain variable domain comprises the amino acid sequence of SEQ ID NO: 1545 and the heavy chain variable domain comprises the amino acid sequence of SEQ ID NO: 1552; (oo) the light chain variable domain comprises the amino acid sequence of SEQ ID NO: 1546 and the heavy chain variable domain comprises the amino acid sequence of SEQ ID NO:1551; (pp) the light chain variable domain comprises the amino acid sequence of SEQ ID NO: 1546 and the heavy chain variable domain comprises the amino acid sequence of SEQ ID NO:1637; (qq) the light chain variable domain comprises the amino acid sequence of SEQ ID NO: 1547 and the heavy chain variable domain comprises the amino acid sequence of SEQ ID NO:1551; (rr) the light chain variable domain comprises the amino acid sequence of SEQ ID NO: 1548 and the heavy chain variable domain comprises the amino acid sequence of SEQ ID NO: 1553; (ss) the light chain variable domain comprises the amino acid sequence of SEQ ID NO: 1630 and the heavy chain variable domain comprises the amino acid sequence of SEQ ID NO: 1638; (tt) the light chain variable domain comprises the amino acid sequence of SEQ ID NO: 1631 and the heavy chain variable domain comprises the amino acid sequence of SEQ ID NO: 1553; (uu) the light chain variable domain comprises the amino acid sequence of SEQ ID NO: 1549 and the heavy chain variable domain comprises the amino acid sequence of SEQ ID NO:1551; (vv) the light chain variable domain comprises the amino acid sequence of SEQ ID NO: 1632 and the heavy chain variable domain comprises the amino acid sequence of SEQ ID NO: 1639; (ww) the light chain variable domain comprises the amino acid sequence of SEQ ID NO: 1549 and the heavy chain variable domain comprises the amino acid sequence of SEQ ID NO: 1640; (xx) the light chain variable domain comprises the amino acid sequence of SEQ ID NO:1550 and the heavy chain variable domain comprises the amino acid sequence of SEQ ID NO:1551; (yy) the light chain variable domain comprises the amino acid sequence of SEQ ID NO: 1633 and the heavy chain variable domain comprises the amino acid sequence of SEQ ID NO:1551; (zz) the light chain variable domain comprises the amino acid sequence of SEQ ID NO: 1634 and the heavy chain variable domain comprises the amino acid sequence of SEQ ID NO: 1642; (aaa) the light chain variable domain comprises the amino acid sequence of SEQ ID NO: 1635 and the heavy chain variable domain comprises the amino acid sequence of SEQ ID NO: 1644; or (bbb) the light chain variable domain comprises the amino acid sequence of SEQ ID NO: 1636 and the heavy chain variable domain comprises the amino acid sequence of SEQ ID NO:1645. In any of the above embodiments, the light chain variable domain and/or heavy chain variable domain comprises an amino acid sequence with at least about 90% homology to the amino acid sequence indicated.

[0331] In some embodiments, the antibody is an antibody disclosed in Tables 2A, 2B, 3A, 3B, 4A, 4B, 7A and 7B of PCT Patent Application Publication No. WO2017/062672A1, reproduced below as TABLES D1-D8.

TABLE D1
EU or Kabat light chain HVR sequences

| Ab ID | HVRL1 | HVRL2 | HVRL3 |
|---|---|---|---|
| 4D11 | RASENIYSFLA | NSKTFAE | QHHYGTPPWT |
| | (SEQ ID NO: 829) | (SEQ ID NO: 844) | (SEQ ID NO: 854) |
| 78C5 | RASENIYSFLA | NSKTFAE | QHHYGTPPWT |
| | (SEQ ID NO: 829) | (SEQ ID NO: 844) | (SEQ ID NO: 854) |
| 6G12 | KSSQSLLYSSNQKNCLA | WAFTRES | QQYYSYPLT |
| | (SEQ ID NO: 830) | (SEQ ID NO: 845) | (SEQ ID NO: 855) |
| 8F11 | KSSQSLLYSSNQKNCLA | LVSKLDS | MQGTHFPLT |
| | (SEQ ID NO: 830) | (SEQ ID NO: 846) | (SEQ ID NO: 856) |
| 8E10 | KSSQSLLDSDGKTYLN | LVSKLDS | WQGTHFPYT |
| | (SEQ ID NO: 832) | (SEQ ID NO: 846) | (SEQ ID NO: 857) |
| 7E5 | KSSQSLLYSNGKTFLS | LVSKLDS | MQGTHFPLT |
| | (SEQ ID NO: 831) | (SEQ ID NO: 846) | (SEQ ID NO: 856) |
| 7F8 | SASSSVSYMY | LTSILAS | QQWSFNPYT |
| | (SEQ ID NO: 833) | (SEQ ID NO: 847) | (SEQ ID NO: 858) |
| 8F8 | RSSQSLVHSNGNTYLH | KVSNRFS | SQSTHVPLT |
| | (SEQ ID NO: 834) | (SEQ ID NO: 848) | (SEQ ID NO: 859) |
| H7 | SASSSVSYMY | LTSILAS | QQWSFNPYT |
| | (SEQ ID NO: 833) | (SEQ ID NO: 847) | (SEQ ID NO: 858) |
| 2H8 | SASSSVSYMY | LTSILAS | QQWSFNPYT |
| | (SEQ ID NO: 833) | (SEQ ID NO: 847) | (SEQ ID NO: 858) |
| 3A2 | RSSQTIIHSNGNTYLE | KVSNRFS | FQGSHVPYT |
| | (SEQ ID NO: 835) | (SEQ ID NO: 848) | (SEQ ID NO: 860) |
| 3A7 | KSSQSLLYSNGKTFLS | LVSKLDS | MQGTHFPLT |
| | (SEQ ID NO: 831) | (SEQ ID NO: 846) | (SEQ ID NO: 856) |
| 3B10 | KSSQSLLYSSDQKNYLA | WASTRES | QQYYSYPLT |
| | (SEQ ID NO: 836) | (SEQ ID NO: 849) | (SEQ ID NO: 855) |
| 4F11 | RSSQTIIHSNGNTYLE | KVSNRFS | FQGSHVPYT |
| | (SEQ ID NO: 835) | (SEQ ID NO: 848) | (SEQ ID NO: 860) |
| 6H6 | KSSQSVFYSSNQKNYLA | WASTRES | HQYLSSLT |
| | (SEQ ID NO: 1401) | (SEQ ID NO: 849) | (SEQ ID NO: 1402) |
| 7A9 | RASENIYSYLA | KAKTLAE | QHHYGTPFT |
| | (SEQ ID NO: 837) | (SEQ ID NO: 850) | (SEQ ID NO: 861) |
| 8A1 | RTSENVYSNLA | AATNLAD | HHFWGTPYT |
| | (SEQ ID NO: 838) | (SEQ ID NO: 851) | (SEQ ID NO: 862) |
| 9F5 | RSSQSLVHSNGYTYLH | KVSNRFS | SQSTRVPYT |
| | (SEQ ID NO: 839) | (SEQ ID NO: 848) | (SEQ ID NO: 863) |
| 9G1 | RFSQSLVHSNGNTYLH | KVSNRFS | SQSTRVPPT |
| | (SEQ ID NO: 840) | (SEQ ID NO: 848) | (SEQ ID NO: 864) |
| 9G3 | KASSNVNYMS | FTSNLPS | SGEVTQFT |
| | (SEQ ID NO: 841) | (SEQ ID NO: 852) | (SEQ ID NO: 865) |
| 10A9 | RSSQTIIHSNGNTYLE | KVSNRFC | FQGSHVPYT |
| | (SEQ ID NO: 835) | (SEQ ID NO: 853) | (SEQ ID NO: 860) |
| 11A8 | KSSQSLLNSGNQKKYLT | WASTRES | QNDYGFPLT |
| | (SEQ ID NO: 842) | (SEQ ID NO: 849) | (SEQ ID NO: 866) |
| 12D9 | KSSQSLLYSGNQKNFLA | WASTRES | QQYYSYPFT |
| | (SEQ ID NO: 843) | (SEQ ID NO: 849) | (SEQ ID NO: 867) |
| 12F9 | KSSQSLLYSSDQKNYLA | WASTRES | QQYYSYPLT |
| | (SEQ ID NO: 836) | (SEQ ID NO: 849) | (SEQ ID NO: 855) |
| 10C1 | KSSQSVFYSSNQKNYLA | WASTRES | HQYLSSLT |
| | (SEQ ID NO: 1401 | (SEQ ID NO: 849) | (SEQ ID NO: 1402) |
| 7E9 | KSSQSLLYSSNQKNCLA | WASTRES | QQYYSYPLT |
| | (SEQ ID NO: 830) | (SEQ ID NO: 849) | (SEQ ID NO: 855) |
| 8C3 | RS SQSLVHSNGNTYLH | KVSNRFS | SQSTHVPPT |
| | (SEQ ID NO: 834) | (SEQ ID NO: 848) | (SEQ ID NO: 1403) |
| IB4v1 | SQDVSTTVA | SASYRYT | QQHYSTPPT |
| | (SEQ ID NO: 1510) | (SEQ ID NO: 1515) | (SEQ ID NO: 1518) |
| IB4v2 | SQSLVHSNGNTYLH | KVSNRVS | SQSTHVPLT |
| | (SEQ ID NO: 1554) | (SEQ ID NO: 1559) | (SEQ ID NO: 859) |
| 6H2 | SQSIVHSNGNTYLE | KVSNRFS | FQGSHVPFT |
| | (SEQ ID NO: 1511) | (SEQ ID NO: 848) | (SEQ ID NO: 1519) |
| 7B11 | SQGVSTAVA | WASTRHT | HQHYSTYT |
| | (SEQ ID NO: 1512) | (SEQ ID NO: 1516) | (SEQ ID NO: 1520) |
| 18D8 | SQDVRTAVA | SASYRYT | QQHYGTPPWT |
| | (SEQ ID NO: 1513) | (SEQ ID NO: 1515) | (SEQ ID NO: 1521) |
| 18E4v1 | SENVVTYVS | GASNRYT | GQGYSYPYT |
| | (SEQ ID NO: 1514) | (SEQ ID NO: 1517) | (SEQ ID NO: 1522) |
| 18E4v2 | SQSLVHSNGNTYLH | KVSDRFS | SQSTHVPLT |
| | (SEQ ID NO: 1554) | (SEQ ID NO: 1560) | (SEQ ID NO: 859) |
| 29F6v1 | SQDVRTAVA | SASYRYT | QQHYGTPPWT |
| | (SEQ ID NO: 1513) | (SEQ ID NO: 1515) | (SEQ ID NO: 1521) |
| 29F6v2 | SQSLVHSNGDTYLH | KVSNRFS | SQSTHVPLT |
| | (SEQ ID NO: 1555) | (SEQ ID NO: 848) | (SEQ ID NO: 859) |
| 40D5 | SQDVRTAVA | SASYRYT | QQHYGTPPWT |
| | (SEQ ID NO: 1513) | (SEQ ID NO: 1515) | (SEQ ID NO: 1521) |
| 43B9 | SQDVRTAVA | SASYRYT | QQHYGTPPWT |
| | (SEQ ID NO: 1513) | (SEQ ID NO: 1515) | (SEQ ID NO: 1521) |
| 44A8v1 | SQDVSTTVA | SASYRYT | QQHYSTPPT |
| | (SEQ ID NO: 1510) | (SEQ ID NO: 1515) | (SEQ ID NO: 1518) |
| 44A8v2 | SESVDYHGTSLMQ | AASNVES | QQNRKILWT |
| | (SEQ ID NO: 1556) | (SEQ ID NO: 1561) | (SEQ ID NO: 1564) |
| 44B4v1 | SQDVRTAVA | SASYRYT | QQHYGTPPWT |
| | (SEQ ID NO: 1513) | (SEQ ID NO: 1515) | (SEQ ID NO: 1521) |
| 44B4v2 | SENIZYSLA | NANSLED | KQAYDVPWT |
| | (SEQ ID NO: 1557) | (SEQ ID NO: 1562) | (SEQ ID NO: 1565) |
| 29F7 | RASQSIGTSIH | FASESIS | QQTNTWPIT |
| | (SEQ ID NO: 1558) | (SEQ ID NO: 1563) | (SEQ ID NO: 1566) |
| 32G1 | RSSQSLVHSNGNTYLH | KVSNRFS | SQSTHVPLT |
| | (SEQ ID NO: 834) | (SEQ ID NO: 848) | (SEQ ID NO: 859) |

TABLE D2
EU or Kabat light chain HVR consensus sequences

| | HVR 1,1 |
|---|---|
| Consensus 1 | RXSENXYSXLA (SEQ ID NO: 1646) |
| Consensus 2 | RSSQXXXHSNGXTYLX (SEQ ID NO: 1647) |
| Consensus 3 | KSSQSXXXSXXQKXXLX (SEQ ID NO: 1648) |

TABLE D3
EU or Kabat heavy chain HVR sequences

| Ab ID | HVR H1 | HVR H2 | HVR H3 |
|---|---|---|---|
| 4D11 | FTLSSYAMS | VASISRGGSTYYP | TRGYGYYRTPFAN |
| | (SEQ ID NO: 868) | (SEQ ID NO: 886) | (SEQ ID NO: 905) |
| 78C5 | FTLSSYAMS | VASISRGGSTYYP | TRGYGYYRTPFAN |
| | (SEQ ID NO: 868) | (SEQ ID NO: 886) | (SEQ ID NO: 905) |
| 6G12 | YTFTEYTMH | IGGINPNNGGTSYS | ARGGSHYYAMDY |
| | (SEQ ID NO: 869) | (SEQ ID NO: 887) | (SEQ ID NO: 906) |
| 8E10 | YTFTDYEMH | IGVIDPETGGTAYN | TSPDYYGSSYPLYYAMDY |
| | (SEQ ID NO: 870) | (SEQ ID NO: 888) | (SEQ ID NO: 907) |
| 7E5 | FTFSDAWMG | VAEIRDKVKNHATYYA | RLGVFDY (SEQ ID NO: 908) |
| | (SEQ ID NO: 871) | (SEQ ID NO: 889) | |
| 7F8 | FSFNTYAMN | IARIRSKSNNYATYYA | VRHGDGNLWYIDV |
| | (SEQ ID NO: 872) | (SEQ ID NO: 890) | (SEQ ID NO: 909) |
| 8F8 | YTVSRYWMH | IGRIDPNSGGTKYN | VLTGTDFDY |
| | (SEQ ID NO: 873) | (SEQ ID NO: 891) | (SEQ ID NO: 910) |
| 1H7 | FSFNTYAMN | IARIRSKSNNYATYY | VRHGDGNLWYIDV |
| | (SEQ ID NO: 872) | A (SEQ ID NO: 890) | (SEQ ID NO: 909) |
| 2H8 | FSFNTYAMN | IARIRSKSNNYATYY | VRHGDGNLWYIDV |
| | (SEQ ID NO: 872) | A (SEQ ID NO: 890) | (SEQ ID NO: 909) |
| 3A2 | YPFSNFWIT | IGDIYPGSDNSNYN | AREAYYTNPGFAY |
| | (SEQ ID NO: 874) | (SEQ ID NO: 892) | (SEQ ID NO: 911) |
| 3A7 | FTFSDAWMG | VAEIRDKVKNHATYYA | RLGVFDY (SEQ ID NO: 908) |
| | (SEQ ID NO: 871) | (SEQ ID NO: 889) | |
| 3B10 | LTSNTYTQT | ESVIRSKSNNFSTLYA | VRHKSNRYPGVY |
| | (SEQ ID NO: 875) | (SEQ ID NO: 893) | (SEQ ID NO: 912) |
| 4F11 | YPFSNFWIT | IGDIYPGSDNSNYN | AREAYYTNPGFAY |
| | (SEQ ID NO: 874) | (SEQ ID NO: 892) | (SEQ ID NO: 911) |
| 6H6 | FTFSDAWMD | VAEIRNKVNNHATYYA | TSLYDGYYLRFAY |
| | (SEQ ID NO: 876) | (SEQ ID NO: 894) | (SEQ ID NO: 913) |
| 7A9 | FTFNTYSMN | VAHIKTKZNNFATFYA | VZHZSNNYPFAY |
| | (SEQ ID NO: 877) | (SEQ ID NO: 895) | (SEQ ID NO: 914) |
| 7B3 | YTFTTYWIH | IGRNDPNSGGSNYN | VRTNWDGDF |
| | (SEQ ID NO: 878) | (SEQ ID NO: 896) | (SEQ ID NO: 915) |
| 8A1 | YAFSNYWMS | IGQIYPGDGDTKYN | SREKGADYYGSTYSAWFSY |
| | (SEQ ID NO: 879) | (SEQ ID NO: 897) | (SEQ ID NO: 916) |
| 9F5 | YAFSSSWMN | IGRIYPGDGDTNYN | ARLLRNQPGESYAMDY |
| | (SEQ ID NO: 880) | (SEQ ID NO: 898) | (SEQ ID NO: 917) |
| 9F5a | YAFSSSWMN | RIYPGDGDTNYNGEFRV | ARLLRNQPGESYAMDY |
| | (SEQ ID NO: 880) | (SEQ ID NO: 1708) | (SEQ ID NO: 917) |
| 9G1 | YIFTTYWIH | IGRIDPNNGDTNYN | VMTGTDFDY |
| | (SEQ ID NO: 881) | (SEQ ID NO: 899) | (SEQ ID NO: 918) |
| 9G3 | FNFNTYAMK | IARIRSNSNDYATNYS | VGHKINNYPFAH |
| | (SEQ ID NO: 882) | (SEQ ID NO: 900) | (SEQ ID NO: 919) |
| 10A9 | YPFSNFWIT | IGDIYPGSDNRNFN | AREAYYTNPGFAY |
| | (SEQ ID NO: 874) | (SEQ ID NO: 901) | (SEQ ID NO: 911) |
| 11A8 | FNFNTYAMN | VARIRSKSNNYATYYA | VRHYSNYGWGFAY |
| | (SEQ ID NO: 883) | (SEQ ID NO: 902) | (SEQ ID NO: 920) |
| 12D9 | YTFSDYYIH | IGYIYPNNGDNGYN | ARRGYYGGSYDY |
| | (SEQ ID NO: 884) | (SEQ ID NO: 903) | (SEQ ID NO: 921) |
| 12F9 | FRFNTYAMT | EGVIRRKSSNFATLYA | VRHKSNKYPFVY |
| | (SEQ ID NO: 885) | (SEQ ID NO: 904) | (SEQ ID NO: 922) |
| 10C1 | FTFSDAWMD | VAEIRNKINNHATYYA | TSLYDGSYLRFAY |
| | (SEQ ID NO: 876) | (SEQ ID NO: 1405) | (SEQ ID NO: 1408) |
| 7E9 | YTFTEYTMH | IGGINPNNGGTSYK | ARGGSHYYAMDY |
| | (SEQ ID NO: 869) | (SEQ ID NO: 1406) | (SEQ ID NO: 906) |
| 8C3 | YSFTGYYMH | IGRVNPNNGGTSYN | VLTGGYFDY |
| | (SEQ ID NO: 1404) | (SEQ ID NO: 1407) | (SEQ ID NO: 1409) |
| 1B4 | SRFTFSSYAMS | VAAISGGGRYTYYP | ARHYDGYLDY |
| | (SEQ ID NO: 1523) | (SEQ ID NO: 1526) | (SEQ ID NO: 1529) |
| 6H2 | SAFSLTNYAVH | LGVIWSGGSTAFN | ATHYYRSTYAFSY |
| | (SEQ ID NO: 1524) | (SEQ ID NO: 1527) | (SEQ ID NO: 1530) |
| 7B11v1 | SRFTFSSYAMS | VAAISGGGRYTYYP | ARHYDGYLDY |
| | (SEQ ID NO: 1523) | (SEQ ID NO: 1526) | (SEQ ID NO: 1529) |
| 7B11v2 | SGYTFTDFYMN | IGDINPNNGHTTYN | AREPYSYGSSPWYFLV |
| | (SEQ ID NO: 1567) | (SEQ ID NO: 1575) | (SEQ ID NO: 1583) |
| 18D8 | SRFTFSSYAMS | VAAISGGGRYTYYP | ARHYDGYLDY |
| | (SEQ ID NO: 1523) | (SEQ ID NO: 1526) | (SEQ ID NO: 1529) |
| 18E4v1 | SRFTFSSYAVS | VATISGGGRYTYYP | ARHYDGYLDY |
| | (SEQ ID NO: 1525) | (SEQ ID NO: 1528) | (SEQ ID NO: 1529) |
| 18E4v2 | SGYTFTAYWMH | IGRTHPSDSDTNYN | ATYSNYVTGAMDS |
| | (SEQ ID NO: 1568) | (SEQ ID NO: 1576) | (SEQ ID NO: 1584) |
| 29F6v1 | SRFTFSSYAMS | VAAISGGGRYTYYP | ARHYDGYLDY |
| | (SEQ ID NO: 1523) | (SEQ ID NO: 1526) | (SEQ ID NO: 1529) |
| 29F6v2 | SGFNIKNTYIH | IGRIDPAIGNTNYA | VSPGMDY |
| | (SEQ ID NO: 1569) | (SEQ ID NO: 1577) | (SEQ ID NO: 1585) |
| 40D5v1 | SRFTFSSYAMS | VAAISGGGRYTYYP | ARHYDGYLDY |
| | (SEQ ID NO: 1523) | (SEQ ID NO: 1526) | (SEQ ID NO: 1529) |
| 40D5v2 | SGYTFTNYWIH | IGRIHPSDSDINYN | VKTGTSFAS |
| | (SEQ ID NO: 1570) | (SEQ ID NO: 1578) | (SEQ ID NO: 1586) |
| 43B9 | SRFTFSSYAMS | VAAISGGGRYTYYP | ARHYDGYLDY |
| | (SEQ ID NO: 1523) | (SEQ ID NO: 1526) | (SEQ ID NO: 1529) |
| 44A8 | SRFTFSSYAMS | VAAISGGGRYTYYP | ARHYDGYLDY |
| | (SEQ ID NO: 1523) | (SEQ ID NO: 1526) | (SEQ ID NO: 1529) |
| 44B4v1 | SRFTFSSYAMS | VAAISGGGRYTYYP | ARHYDGYLDY |
| | (SEQ ID NO: 1523) | (SEQ ID NO: 1526) | (SEQ ID NO: 1529) |
| 44B4v2 | SGYTFTSATMH | IGYINPNSGYSKYN | ARWGIDGNYGGGFFDV |
| | (SEQ ID NO: 1571) | (SEQ ID NO: 1579) | (SEQ ID NO: 1587) |
| 45D6 | YSFTDYNIH | IGYINPNSDNTRYI | TRGFSNLGAMDY |
| | (SEQ ID NO: 1572) | (SEQ ID NO: 1580) | (SEQ ID NO: 1588) |
| 29F7 | FTLSNYWMN | VAQIRLKSDNYATHYA | TGAGGNHENY |
| | (SEQ ID NO: 1573) | (SEQ ID NO: 1581 | (SEQ ID NO: 1589) |
| 32G1 | YTFTDYNIH | IGYINPNNGGTTYN | ATTYVSFSY |
| | (SEQ ID NO: 1574) | (SEQ ID NO: 1582 | (SEQ ID NO: 1590) |

TABLE D4
EU or Kabat heavy chain HVR consensus sequences

| | HVR H1 | HVR H2 |
|---|---|---|
| Consensus 1 | YX₁X₂X₃XYXXH | IGXXXPX₁X₂X₃X₄X₅XYX₆ |
| | X₁ is T or S | X₁ is N or E |
| | X₂ is F or V | X₂ is N, S, or T |
| | X₃ is T or S | X₃ is G or D |
| | (SEQ ID NO: 1649) | X₄ is G, D, or N |
| | | X₅ is T, S, or N |
| | | X₆ is N, 5, K, or I |
| | | (SEQ ID NO: 1656) |
| Consensus 2 | YTFTXYXXH | IGXXXPNNGGTXYN (SEQ ID NO: 1657) |
| | (SEQ ID NO: 1650) | |
| Consensus 3 | FTFSDAWMX₁ | VAEIRX₁KX₂X₃NHATYYA |
| | X₁ is D or G (SEQ ID NO: 1651) | X₁ is N or D |
| | | X₂ iS V or I |
| | | X₃ is N or K (SEQ ID NO: 1658) |
| Consensus 4 | FXX₁X₂X₃YX₄MX₅ | XX₁XIX₂X₃X₄X₅X₆X₇X₈ATXYX₉ |
| | x₁ is F or L | X₁ is A or G |
| | X₂ is N or S | X₂ is R or K |
| | X₃ is T or N | X₃ is S, T, R, or L |
| | X₄ is A, S, or W | X₄ is K or N |
| | X₅ is N, K, or T | X₅ is S, E, or Q |
| | (SEQ ID NO: 1652) | X₆ is N, S, or D |
| | | X₇ is N or D |
| | | X₈ is Y or F |
| | | X₉ is A or S (SEQ ID NO: 1659) |
| Consensus 5 | FXFNTYAMN | XAXIRSKSNNYATXYA |
| | (SEQ ID NO: 1653) | (SEQ ID NO: 1660) |
| Consensus 6 | YXFX₁X₂XWX₃X | IGXIX₁PX₂XX₃X₄X₅X₆X₇N |
| | X₁ is S or T | X₁ is Y or D |
| | X₂ is N, S, or T | X₂ is G or N |
| | X₃ iS I or M (SEQ ID NO: 1654) | X₃ is G or D |
| | | X₄ is N or D |
| | | X₅ is T, R, or S |
| | | X₆ is N or K |
| | | X₇ is Y or F (SEQ ID NO: 1661) |
| Consensus 7 | YXFSNMVIX | IGXIYPGXGDTNYN (SEQ ID NO: 1662) |
| | (SEQ ID NO: 1655) | |

TABLE D5
EU or Kabat light chain Framework sequences

| Ab ID | VL FR1 | VL FR2 | VL FR3 | VL FR4 |
|---|---|---|---|---|
| 4D11 | DIZVTQSPASLSAS | WYQLKQGKSPQ | GVPSRFSGSGSGTQFS | FGGGTKLEIK |
| | VGETVTITC | LLVY | LRINSLQPEDFGSYYC | (SEQ ID NO: 968) |
| | (SEQ ID NO: 923) | (SEQ ID NO: 940) | (SEQ ID NO: 950) | |
| 78C5 | DIZVTQSPASLSAS | WYQLKQGKSPQ | GVPSRFSGSGSGTQFS | FGGGTKLEIK |
| | VGETVTITC | LLVY | LRINSLQPEDFGSYYC | (SEQ ID NO: 968) |
| | (SEQ ID NO: 923) | (SEQ ID NO: 940) | (SEQ ID NO: 950) | |
| 6G12 | TMSQSPSSLAVSV | WYQQKPGQSPK | GVPDRFTGSGSGTDF | FGAGTKLELK |
| | GEKVTMSC | LLIY | TLTISSVKAEDLAVY | (SEQ ID NO: 969) |
| | (SEQ ID NO: 924) | (SEQ ID NO: 941) | YC (SEQ ID NO: 951) | |
| 8F11 | DVZMTQTPLTLSV | WLLQRPGQSPK | GVPDRFAGSGSGTDF | FGAGTKLELK |
| | TIGQPASISC | RLIY | TLKISRLEADDLGIYY | (SEQ ID NO: 969) |
| | (SEQ ID NO: 925) | (SEQ ID NO: 942) | C (SEQ ID NO: 952) | |
| 8E10 | DVZMTQTPLTLSV | WLLQRPGQSPK | GVPDRFTGSGSGTDF | FGGGTKLEIK |
| | TIGQPASISC | RLIY | TLKISRVEAEDLGVY | (SEQ ID NO: 968) |
| | (SEQ ID NO: 925) | (SEQ ID NO: 942) | YC (SEQ ID NO: 953) | |
| 7E5 | DVZMTQTPLTLSV | WLLQRPGQSPK | GVPDRFAGSGSGTDF | FGAGTKLELK |
| | TIGQPASISC | RLIY | TLKISRLEADDLGIYY | (SEQ ID NO: 969) |
| | (SEQ ID NO: 925) | (SEQ ID NO: 942) | C (SEQ ID NO: 952) | |
| 7E5v2 | DVVMTQTPLTLSV | WLLQRPGQSPK | GVPDRFAGSGSGTDF | FGAGTKLELK |
| | TIGQPASISC | RLIY | TLKISRLEADDLGIYY | (SEQ ID NO: 969) |
| | (SEQ ID NO: 931) | (SEQ ID NO: 942) | C (SEQ ID NO: 952) | |
| 7F8 | VLTQSPALMSASP | WYQQKPRSSPK | GVPARFSGSGSGTSY | FGGGTKLVIK |
| | GEKVTMTC | PWIY | SLTINNMEAEDAATY | (SEQ ID NO: 970) |
| | (SEQ ID NO: 926) | (SEQ ID NO: 943) | YC (SEQ ID NO: 954) | |
| 8F8 | DVZMTQTPLSLPV | WYLQKPGQSPK | GVPDRFSGSGSGTDF | FGAGTKLELK |
| | SLGDQASISC | LLIY | TLKISRVEAEDLGVY | (SEQ ID NO: 969) |
| | (SEQ ID NO: 927) | (SEQ ID NO: 944) | FC (SEQ ID NO: 955) | |
| 1H7 | VLTQSPAIMZASP | WYQQKPRSSPK | GVPARFSGSGSGTSY | FGGGTKLVIK |
| | GEKVTMTC | PWIY | SLTISSMEAEDAATY | (SEQ ID NO: 970) |
| | (SEQ ID NO: 928) | (SEQ ID NO: 943) | YC (SEQ ID NO: 956) | |
| 2H8 | NVLTQSPALMSAS | WYQQKPRSSPK | GVPARFSGSGSGTSY | FGGGTKLVIK |
| | PGEKVTMTC | PWIY | SLTISSMEAEDAATY | (SEQ ID NO: 970) |
| | (SEQ ID NO: 929) | (SEQ ID NO: 943) | YC (SEQ ID NO: 956) | |
| 3A2 | DVVMTQTPLSLPV | WYLRKPGQSPK | GVPDRFSGSGSGTDF | FGGGTELEIK |
| | SLGDQASISC | LLIY | TLKISRVEAEDLGVY | (SEQ ID NO: 971) |
| | (SEQ ID NO: 930) | (SEQ ID NO: 945) | YC (SEQ ID NO: 957) | |
| 3A7 | DVVMTQTPLTLSV | WLLQRPGQSPK | GVPDRFAGSGSGTDF | FGGGTKLEMK |
| | TIGQPASISC | RLIY | TZKISRLEADDLGIYY | (SEQ ID NO: 972) |
| | (SEQ ID NO: 931) | (SEQ ID NO: 942) | C (SEQ ID NO: 958) | |
| 3B10 | ITMSQSPSSLAVSV | WYQQKPGQSPK | GVPDRFTGSGSGTDF | FGAGTKLELK |
| | GEKVTMSC | LLIY | TLTISSVKAEDLAVY | (SEQ ID NO: 969) |
| | (SEQ ID NO: 932) | (SEQ ID NO: 941) | CC (SEQ ID NO: 959) | |
| 4F11 | DVZMTQTPLSLPV | WYLRKPGQSPK | GVPDRFSGSGSGTDF | FGGGTELEIK |
| | SLGDQASISC | LLIY | TLKISRVEGEDLGVY | (SEQ ID NO: 971) |
| | (SEQ ID NO: 927) | (SEQ ID NO: 945) | YC (SEQ ID NO: 960) | |
| 6H6 | QTQSPSSLAVSAG | WYQQKPGQSPK | GVPDRFTGSGFGTDF | FGAGTKLELK |
| | EKVTLSC | LLIS | TLTISSVQGEDLAVY | (SEQ ID NO: 969) |
| | (SEQ ID NO: 1410) | (SEQ ID NO: 1413) | YC (SEQ ID NO: 1414) | |
| 7A9 | QMSQSPACLZAZV | WYQQKQGKSPK | GVPSRFSGRGSGTQF | FGSGTKLEIK |
| | GESVTITC | LVVY | FLKINSZQREDFGSY | (SEQ ID NO: 973) |
| | (SEQ ID NO: 933) | (SEQ ID NO: 946) | YC (SEQ ID NO: 961) | |
| 8A1 | DIQMTQSPASLSVS | WYQQKQGKSPQ | GVPSRFSASGSATQFS | FGGGTKLEMN |
| | VGETVTITC | LLVY | LKINSLQSADFGSYY | (SEQ ID NO: 974) |
| | (SEQ ID NO: 934) | (SEQ ID NO: 947) | C (SEQ ID NO: 962) | |
| 9F5 | DVZMTQNPLSLPV | WYLQKPGQSPK | GVPDRFSGSGSGTDF | FGGGTKLEIK |
| | SLGDQASISC | LLIY | TLKISRVEADDLGVY | (SEQ ID NO: 968) |
| | (SEQ ID NO: 935) | (SEQ ID NO: 944) | LC (SEQ ID NO: 963) | |
| 9F5v2 | DVVMTQTPLSLPV | WYLQKPGQSPK | GVPDRFSGSGSGTDF | FGGGTKLEIK |
| | SLGDQASISC | LLIY | TLKISRVEADDLGVY | (SEQ ID NO: 968) |
| | (SEQ ID NO: 930) | (SEQ ID NO: 944) | FC (SEQ ID NO: 1668) | |
| 9G1 | DVLMTQTPLSLPV | WYLQKPGQSPK | GVPDRFSGSGSGTDF | FGGGTKLEIK |
| | SLGDQASISC | LLIY | TLRISGVEAEDLGVY | (SEQ ID NO: 968) |
| | (SEQ ID NO: 936) | (SEQ ID NO: 944) | FC (SEQ ID NO: 964) | |
| 9G3 | NVLTQSPALIWAZ | WXXXKPRSSPK | GVPGRFSGSGSGTYX | FGGGTKLEMK |
| | PGEKVTMTC | PGIY | SFKISSMEGKMGPLII | (SEQ ID NO: 975) |
| | (SEQ ID NO: 937) | (SEQ ID NO: 948) | FC (SEQ ID NO: 965) | |
| 10A9 | DVVMTQTPLSLPV | WYLRKPGQSPK | GVPDRFSGSGSGTDF | FGGGTELEIK |
| | SLGDQASISC | LLIY | TLKISRVEAEDLGVY | (SEQ ID NO: 971) |
| | (SEQ ID NO: 930) | (SEQ ID NO: 945) | YC (SEQ ID NO: 957) | |
| 11A8 | DIZMTQSPSSLTVT | WYQQKPGQPZK | GVRDRFTGSGZGTDF | FGGGTKLEMK |
| | AGEKVTMSC | LLIY | TLTISSVQGEDLAIYY | (SEQ ID NO: 972) |
| | (SEQ ID NO: 938) | (SEQ ID NO: 949) | C (SEQ ID NO: 966) | |
| 12D9 | TQSPSSLAVSVGE | WYQQKPGQSPK | GVPDRFTGSGSGTDF | FGSGTKLEIK |
| | KVTMTC | LLIY | TLTISTVKAEDLAVY | (SEQ ID NO: 973) |
| | (SEQ ID NO: 939) | (SEQ ID NO: 941) | YC (SEQ ID NO: 967) | |
| 12F9 | TMSQSPSSLAVSV | WYQQKPGQSPK | GVPDRFTGSGSGTDF | FGAGTKLELK |
| | GEKVTMSC | LLIY | TLTISSVKAEDLAVY | (SEQ ID NO: 969) |
| | (SEQ ID NO: 924) | (SEQ ID NO: 941) | CC (SEQ ID NO: 959) | |
| 10C1 | QTQVFLSLLLWVS | WYQQKPGQSPK | GVPDRFTGSGSGTDF | FGAGTKLELK |
| | GTCGNIMLTQSPSS | LLIS | TLTINSVQAEDLAVY | (SEQ ID NO: 969) |
| | LAVSAGEKVTLSC | (SEQ ID NO: 1413) | YC (SEQ ID NO: 1415) | |
| | (SEQ ID NO: 1411) | | | |
| 7E9 | DIVMSQSPSSLAVS | WYQQKPGQSPK | GVPDRFTGSGSGTDF | FGAGTKLELK |
| | VGEKVTMSC | LLIY | TLTISSVKAEDLAVY | (SEQ ID NO: 969) |
| | (SEQ ID NO: 1412) | (SEQ ID NO: 941) | YC (SEQ ID NO: 951) | |
| 8C3 | DVVMTQTPLSLPV | WYLQKPGQSPK | GVPDRFSGSGSGTDF | FGSGTKLEIK |
| | SLGDQASISC | LLIY | TLKISRVEAEDLGVY | (SEQ ID NO: 973) |
| | (SEQ ID NO: 930) | (SEQ ID NO: 944) | FC (SEQ ID NO: 955) | |
| IB4v1 | DIVMTQSHKFMST | WYQQKPGQSPK | GVPDRFTGSGFGTDF | FGGGTKLEIK |
| | SVGDRVSITCKA | LLIY | TFTISSVQAEDLAVY | (SEQ ID NO: 968) |
| | (SEQ ID NO: 1531) | (SEQ ID NO: 941) | YC (SEQ ID NO: 1535) | |
| IB4v2 | ZVVZTQTPLSLPVS | WFLQKPGQSPK | GVPDRFSGSGSGTDF | FGAGTKLELK |
| | LGDQASFSCRS | LLIF | TLKISRVEAEDLGVY | (SEQ ID NO: 969) |
| | (SEQ ID NO: 1591) | (SEQ ID NO: 1597) | FC (SEQ ID NO: 955) | |
| 6H2 | DVLMTQTPLSLPV | WYLQKPGQSPK | GVPDRFSGSGSGTDF | FGSGTKLEIK |
| | SLGDQASISCRS | LLIY | TLKISRVEAEDLGVY | (SEQ ID NO: 973) |
| | (SEQ ID NO: 1532) | (SEQ ID NO: 944) | YC (SEQ ID NO: 957) | |
| 7B11 | DIVMTQSHKFMST | WYQQKPGQSPK | GVPDRFTGSGSGTDY | FGGGTKLEIK |
| | SVGDRVSITCKA | LLIY | TLTISSVQAEDLALY | (SEQ ID NO: 968) |
| | (SEQ ID NO: 1531) | (SEQ ID NO: 941) | YC (SEQ ID NO: 1536) | |
| 18D8 | DIVMTQSHKFMST | WYQQKPGQSPK | GVPDRFTGSGFGTDF | FGGGTKLEIK |
| | SIGARVSITCKA | LLIY | TFTISSVQAEDLAVY | (SEQ ID NO: 968) |
| | (SEQ ID NO: 1533) | (SEQ ID NO: 941) | YC (SEQ ID NO: 1535) | |
| 18E4v1 | DIVMTQSPKSMSM | WYQQKPGQSPK | GVPDRFTGSGSATDF | FGGGTKLEIK |
| | SVGERVTLTCKA | LLIY | TLTISSVQAEDLADY | (SEQ ID NO: 968) |
| | (SEQ ID NO: 1534) | (SEQ ID NO: 941) | HC (SEQ ID NO: 1537) | |
| 18E4v2 | NIVMTQSPKSMSM | WYQQKPGQSPK | GVPDRFTGSGSATDF | FGGGTKLEIK |
| | SVGERVTLTCKA | LLIY | TLTISSVQAEDLADY | (SEQ ID NO: 968) |
| | (SEQ ID NO: 1592) | (SEQ ID NO: 941) | HC (SEQ ID NO: 1537) | |
| 18E4v3 | DVVMTQTPLSLPV | WYLQKPGQSPK | GVPDRFSGSGSGTDF | FGAGTKLELK |
| | SLGDQASISCRS | LLIY | TLRISRVEAEDLGVY | (SEQ ID NO: 969) |
| | (SEQ ID NO: 1593) | (SEQ ID NO: 944) | FC (SEQ ID NO: 1601) | |
| 29F6v1 | DIVMTQSHKFMST | WYQQKPGQSPK | GVPDRFTGSGSGTDF | FGGGTKLEIK |
| | SIGARVSITCKA | LLIY | TFTISSVQAEDLAVY | (SEQ ID NO: 968) |
| | (SEQ ID NO: 1533) | (SEQ ID NO: 941) | YC (SEQ ID NO: 1538) | |
| 29F6v2 | DVVMTQTPLSLPV | WYLQKPGQSPK | GVPDRFSGSGSGTDF | FGAGTKLELK |
| | SLGDQASISCRS | LLIY | TLKISRVEAEDLGVY | (SEQ ID NO: 969) |
| | (SEQ ID NO: 1593) | (SEQ ID NO: 944) | FC (SEQ ID NO: 955) | |
| 40D5 | DIVMTQSHKFMST | WYQQKPGQSPK | GVPDRFTGSGSGTDF | FGGGTKLEIK |
| | SIGARVSITCKA | LLIY | TFTISSVQAEDLAVY | (SEQ ID NO: 968) |
| | (SEQ ID NO: 1533) | (SEQ ID NO: 941) | YC (SEQ ID NO: 1538) | |
| 43B9 | DIVMTQSHKFMST | WYQQKPGQSPK | GVPDRFTGSGSGTDF | FGGGTKLEIK |
| | SIGARVSITCKA | LLIY | TFTISSVQAEDLAVY | (SEQ ID NO: 968) |
| | (SEQ ID NO: 1533) | (SEQ ID NO: 941) | YC (SEQ ID NO: 1538) | |
| 44A8v1 | DIVMTQSHKFMST | WYQQKPGQSPK | GVPDRFTGSGSGTDF | FGGGTKLEIK |
| | SVGDRVSITCKA | LLIY | TFTISSVQAEDLAVY | (SEQ ID NO: 968) |
| | (SEQ ID NO: 1531) | (SEQ ID NO: 941) | YC (SEQ ID NO: 1538) | |
| 44A8v2 | DIVLTQSPASLAVS | WYQQKPGQPPK | GVPARFSGSGSGTDF | FGGGTKLEIK |
| | LGQRATISCRA | LLIY | SLNIHPVEEDDIAMY | (SEQ ID NO: 968) |
| | (SEQ ID NO: 1594) | (SEQ ID NO: 1598) | FC (SEQ ID NO: 1602) | |
| 44B4v1 | DIVMTQSHKFMST | WYQQKPGQSPK | GVPDRFTGSGSGTDF | FGGGTKLEIK |
| | SIGARVSITCKA | LLIY | TFTISSVQAEDLAVY | (SEQ ID NO: 968) |
| | (SEQ ID NO: 1533) | (SEQ ID NO: 941) | YC (SEQ ID NO: 1538) | |
| 44B4v2 | DIQMTQFPASLAA | WYQQKQGKSPQ | GVPSRFSGSGSGTQY | FGGGTKLEIK |
| | XVGESVTITCRA | LLIY | SMKINSMQPEDTAIY | (SEQ ID NO: 968) |
| | (SEQ ID NO: 1595) | (SEQ ID NO: 1599) | FC (SEQ ID NO: 1603) | |
| 29F7 | ILLTQSPAILSVSPG | WYQQRTNGSPR | GIPSRFSGSGSGTDFT | FGAGTKLELK |
| | ERVSFSC | LLIK | LNINSVESEDIADYYC | (SEQ ID NO: 969) |
| | (SEQ ID NO: 1596) | (SEQ ID NO: 1600) | (SEQ ID NO: 1604) | |
| 32G1 | DVVMTQTPLSLPV | WYLQKPGQSPK | GVPDRFSGSGSGTDF | FGAGTKLELK |
| | SLGDQASISC | LLIY | TLKISRVEAEDLGVY | (SEQ ID NO: 969) |
| | (SEQ ID NO: 930) | (SEQ ID NO: 944) | FC (SEQ ID NO: 955) | |

TABLE D6
EU or Kabat heavy chain Framework sequences

| Ab ID | VH FR1 | VH FR2 | VH FR3 | VH FR4 |
|---|---|---|---|---|
| 44D11 | EVKLVESGGGLV | WVRQTPEKRLEW | DSVQGRFTFSRDNA | WGQGTLVTVSA |
| | KPGGSLKLSCAAS | (SEQ ID NO: 995) | RNILYLQMSSLRSED | (SEQ ID NO: 1029) |
| | G (SEQ ID NO: 976) | | TAMYYC | |
| | | | (SEQ ID NO: 1008) | |
| 78C5 | EVKLVESGGGLV | WVRQTPEKRLEW | DSVQGRFTFSRDNA | WGQGTLVTVSA |
| | KPGGSLKLSCAAS | (SEQ ID NO: 995) | RNILYLQMSSLRSED | (SEQ ID NO: 1029) |
| | G (SEQ ID NO: 976) | | TAMYYC | |
| | | | (SEQ ID NO: 1008) | |
| 6G12 | EVQLQQSGPELVK | WVKQSHGKSLEW | QKFKGKASLTVDKS | WGQGTSVTVSS |
| | PGTSVKISCKTSG | (SEQ ID NO: 996) | SSTAYMELHSLASD | (SEQ ID NO: 1030) |
| | (SEQ ID NO: 977) | | DSAVYYC | |
| | | | (SEQ ID NO: 1009) | |
| 8E10 | QVQLQQSGAELV | WVKQTPVHGLEW | QKFKGKAILTADKS | WGQGTSVTVSS |
| | RPGASVTLSCKAS | (SEQ ID NO: 997) | SSTAYMELRSLTSED | (SEQ ID NO: 1030) |
| | G (SEQ ID NO: 978) | | SAVYYC | |
| | | | (SEQ ID NO: 1010) | |
| 7E5 | EVKLEESGGGLVQP | WVRQSPEKGLEW | ESVKGRFTISRDDSK | WGQGTTLTVSS |
| | GGSMKLSCAASG | (SEQ ID NO: 998) | STVYLQMNTLRADD | (SEQ ID NO: 1031) |
| | (SEQ ID NO: 979) | | TGIYYC | |
| | | | (SEQ ID NO: 1011) | |
| 7F8 | EVQLVESGGGLV | WVRQAPGKGLEW | DSVKDRITCSRDDSE | WGTGTTVTVST |
| | QPKGSLKLSCAA | (SEQ ID NO: 999) | NMFYLQLSSLKTED | (SEQ ID NO: 1032) |
| | SG | | TAMYYC | |
| | (SEQ ID NO: 980) | | (SEQ ID NO: 1012) | |
| 8F8 | QVQLQQSGAELVK | WVKQRPGRGLEW | EKFKTKATLTVDKP | WGQGTTLTVSS |
| | PGASVKLSCKASG | (SEQ ID NO: 1000) | SSTAYMQVSSLTSE | (SEQ ID NO: 1031) |
| | (SEQ ID NO: 981) | | DSAVYYC | |
| | | | (SEQ ID NO: 1013) | |
| IH7 | ZVQLVESGGGLV | WVRQAPGKGLEW | DSVKDRFTCSRDDS | WGTGTTVTVSS |
| | QPKGSLKLSCAA | (SEQ ID NO: 999) | ENMFYLQLSSLKTE | (SEQ ID NO: 1033) |
| | SG | | DTAIYYC | |
| | (SEQ ID NO: 982) | | (SEQ ID NO: 1014) | |
| 2HS | EVQLVESGGGLVQP | WVRQAPGKGLEW | DSVKDRFTCSRDDS | WGTGTTVTVSS |
| | KGSLKLSCAASG | (SEQ ID NO: 999) | ENMFYLQLSSLKTE | (SEQ ID NO: 1033) |
| | (SEQ ID NO: 980) | | DTAMYYC | |
| | | | (SEQ ID NO: 1015) | |
| 3A2 | QVQLQQSGAELVK | WVKQRPGQGLV | EKFKTKATLTVDTSS | WGQGTLVTVST |
| | PGASVKMSCKTSG | W | STAYMHLSSLTSEDS | (SEQ ID NO: 1034) |
| | (SEQ ID NO: 983) | (SEQ ID NO: 1001) | AVYFC | |
| | | | (SEQ ID NO: 1016) | |
| 3A7 | EVKLEESGGGLVQP | WVRQSPEKGLEW | ESVKGRFTISRDDSK | WGQGTTLTVSS |
| | GGSMKLSCAASG | (SEQ ID NO: 998) | STVYLQMNTLRADD | (SEQ ID NO: 1031) |
| | (SEQ ID NO: 979) | | TGIYYC | |
| | | | (SEQ ID NO: 1011) | |
| 3B10 | EVQLVZZGRGZSQ | GVPQGPGKGREW | DSVKDRFTZSRDDS | WGQGTIVTVS |
| | GKGSXZZGRAZRC | (SEQ ID NO: 1002) | ESLFYZQMSZZKZE | (SEQ ID NO: 1035) |
| | (SEQ ID NO: 984) | | DTAMYYZ | |
| | | | (SEQ ID NO: 1017) | |
| 4F11 | QVQLQQSGAELVK | WVKQRPGQGLV | EKFKTKATLTVDTSS | WGQGTLVTVST |
| | PGASVKMSCKTSG | W | STAYMHLS | (SEQ ID NO: 1034) |
| | (SEQ ID NO: 983) | (SEQ ID NO: 1001) | SLTSEDSAVYFC | |
| | | | (SEQ ID NO: 1016) | |
| 6H6 | EVKLEESGGGLVQP | WVRQSPEKGLEW | ESVKGRFTISRDDSK | WGQGTLVTVSA |
| | GGSMKLSCTASG | (SEQ ID NO: 998) | STVYLQMNSLRTED | (SEQ ID NO: 1029) |
| | (SEQ ID NO: 985) | | TGIYYC | |
| | | | (SEQ ID NO: 1018) | |
| 7A9 | LSCAASG | WVRQAPGKGLEW | DSVKDRFTISRDDSE | WGQGTLVTVSA |
| | (SEQ ID NO: 986) | (SEQ ID NO: 999) | SMLYLQMZNLKTED | (SEQ ID NO: 1029) |
| | | | TAMYYC | |
| | | | (SEQ ID NO: 1019) | |
| 7B3 | QVQLQQSGAVLVK | WVKQRPGRGPEW | EKFRNKAILTVDKPS | WGQGTTLTVSS |
| | PGASVKLSCKASG | (SEQ ID NO: 1003) | STAYMQLNSLTSED | (SEQ ID NO: 1031) |
| | (SEQ ID NO: 987) | | ZAVYYC | |
| | | | (SEQ ID NO: 1020) | |
| 8A1 | EVQLQQSGAELVK | WVKQRPGKGLEW | GKFEGKATLTADKS | WGQGTLVTVSA |
| | PGASVKISCKASG | (SEQ ID NO: 1004) | SSTAYMQLSSLTSED | (SEQ ID NO: 1029) |
| | (SEQ ID NO: 988) | | SAVYFC | |
| | | | (SEQ ID NO: 1021) | |
| 9F5 | QVQLQQSGPELVK | WVKQRPGKGLEW | GEFRVRATLTADTSS | WGQGASVTVSS |
| | PGASLKISCKASG | (SEQ ID NO: 1004) | TTAYMQLSSLTSEDS | (SEQ ID NO: 1036) |
| | (SEQ ID NO: 989) | | AVYFC | |
| | | | (SEQ ID NO: 1022) | |
| 9G1 | QVQLQQSGAELVK | WVKQRPGRGPEW | EKFKTKATLTVDKP | WGQGTTLTVSS |
| | PGASVKLSCKASG | (SEQ ID NO: 1003) | SSTADMQLSSLTSED | (SEQ ID NO: 1031) |
| | (SEQ ID NO: 981) | | SAVYYC | |
| | | | (SEQ ID NO: 1023) | |
| 9G3 | EVQLVESGGGLVQP | WVRQTPGKGLEW | DSVKDRFTISRDDSE | WGRGTLV |
| | KGSLKLSCAAFG | (SEQ ID NO: 1005) | SIVYVQMNNLKTED | (SEQ ID NO: 1037) |
| | (SEQ ID NO: 990) | | TGMYSC | |
| | | | (SEQ ID NO: 1024) | |
| 10A9 | QVQLQQSGAEVVK | WVKQRPGQGLV | ERFKTKATLTVDTSS | WGQGTLVTVSA |
| | PGASVKMSCKTSG | W | STAYMHLSSLTSEDS | (SEQ ID NO: 1029) |
| | (SEQ ID NO: 991) | (SEQ ID NO: 1001) | AVYFC | |
| | | | (SEQ ID NO: 1025) | |
| 11A8 | EVQLVESGGRLVQP | WVRQAPGKGLEW | DSVKDRFTISRDDSE | WGQGTLVTVSA |
| | KGSLKLSCAASG | (SEQ ID NO: 999) | SMLYLQMNNLKTE | (SEQ ID NO: 1029) |
| | (SEQ ID NO: 992) | | DTAMYYC | |
| | | | (SEQ ID NO: 1026) | |
| 12D9 | QVQLQQYGPELVK | WMKQSHGKSLE | QEFKGKATLTVDKS | WGQGT |
| | PGASVKMSCKVSG | W | SS | (SEQ ID NO: 1038) |
| | (SEQ ID NO: 993) | (SEQ ID NO: 1006) | TAYMELRSLTFEDS | |
| | | | AV YZC | |
| | | | (SEQ ID NO: 1027) | |
| 12F9 | WRIGQGKGSLKLA | RVRQGPGKGREW | DSVKDRFRASRDDS | WGQGTLVTVSA |
| | RAARG | (SEQ ID NO: 1007) | ES | (SEQ ID NO: 1029) |
| | (SEQ ID NO: 994) | | MLYVQMSNWKQED | |
| | | | T AMYYG | |
| | | | (SEQ ID NO: 1028) | |
| iOCi | GVQSEVKFEESGG | WVRQSPEKGLEW | ESVKGRFTISRDDSK | WGQGTLVTVSA |
| | GLVQPGGSMKLSC | (SEQ ID NO: 998) | SSVSLQMNSLRTED | (SEQ ID NO: 1029) |
| | TASG | | TGIYYC | |
| | (SEQ ID NO: 1416) | | (SEQ ID NO: 1419) | |
| 7E9 | QVQLQQSGPELVK | WVKQSHGKSLEW | QKFKGKATLTVDRS | WGQGTSVTVSS |
| | PGASVKISCKTSG | (SEQ ID NO: 996) | SSTAYMELRSLTSED | (SEQ ID NO: 1030) |
| | (SEQ ID NO: 1417) | | SAVYYC | |
| | | | (SEQ ID NO: 1420) | |
| SC3 | QVQLQQSGPDLVKP | WVKQSHGKSLEW | QKFKGKAILTVDKS | WGQGTTLTVSS |
| | GASVKISCKASG | (SEQ ID NO: 996) | SSTAYMELRSLTSED | (SEQ ID NO: 1031) |
| | (SEQ ID NO: 1418) | | SAVYYC | |
| | | | (SEQ ID NO: 1421) | |
| 1B4 | EVQLVESGGGLVKP | WVRQTPEKRLEW | DSMKGRFTISRDNA | WGQGTTLTVSS |
| | GGSLKLSCEA | (SEQ ID NO: 995) | KNFLYLQMSSLRSE | (SEQ ID NO: 1031) |
| | (SEQ ID NO: 1539) | | DTAMYYC | |
| | | | (SEQ ID NO: 1542) | |
| 6H2 | QVQLQESGPGLVQP | WIRQSPGKGLEW | AAFISRLNISKDNSK | WGQGTLVTVSA |
| | SQSLSIICTV | (SEQ ID NO: 1541) | SQVFFKMNSLQSDD | (SEQ ID NO: 1029) |
| | (SEQ ID NO: 1540) | | TAIYYC | |
| | | | (SEQ ID NO: 1543) | |
| 7B11v1 | EVQLVESGGGLVKP | WVRQTPEKRLEW | DSMKGRFTISRDNA | WGQGTTLTVSS |
| | GGSLKLSCEA | (SEQ ID NO: 995) | KNFLYLQMSSLRSE | (SEQ ID NO: 1031) |
| | (SEQ ID NO: 1539) | | DTAMYYC | |
| | | | (SEQ ID NO: 1542) | |
| 7B11v2 | EVQZQQSGPELVKP | WVKQSLGKSLEW | QKFKGKATLTVDKS | RGTGTTVTV |
| | GASVKISCKA | (SEQ ID NO: 1613) | SSTAYMELRSLTXEE | (SEQ ID NO: 1626) |
| | (SEQ ID NO: 1605) | | SAVYYC | |
| | | | (SEQ ID NO: 1618) | |
| 18D8 | EVQLVESGGGLVKP | WVRQTPEKRLEW | DSMKGRFTISRDNA | WGQGTTLTVSS |
| | GGSLKLSCEA | (SEQ ID NO: 995) | KNFLYLQMSSLRSE | (SEQ ID NO: 1031) |
| | (SEQ ID NO: 1539) | | DTAMYYC | |
| | | | (SEQ ID NO: 1542) | |
| 18E4v1 | EVQLVESGGGLVKP | WVRQTPEKRLEW | DSMKGRFTISRDNA | WGQGTTLTVSS |
| | GGSLKLSCEA | (SEQ ID NO: 995) | KNFLYLQMSSLRSE | (SEQ ID NO: 1031) |
| | (SEQ ID NO: 1539) | | DTAMYYC | |
| | | | (SEQ ID NO: 1542) | |
| 18E4v2 | QVQLQQPGAELVK | WVKEKPGQGLEW | HNFKGKATLTVDKS | WGQGTSVTVSS |
| | PGASVKVSCKA | (SEQ ID NO: 1614) | SSTAYMQLNSLTSE | (SEQ ID NO: 1030) |
| | (SEQ ID NO: 1606) | | DSAVYYC | |
| | | | (SEQ ID NO: 1619) | |
| 29F6v1 | EVQLVESGGGLVKP | WVRQTPEKRLEW | DSMKGRFTISRDNA | WGQGTTLTVSS |
| | GGSLKLSCEA | (SEQ ID NO: 995) | KNFLYLQMSSLRSE | (SEQ ID NO: 1031) |
| | (SEQ ID NO: 1539) | | DTAMYYC | |
| | | | (SEQ ID NO: 1542) | |
| 29F6v2 | QVQLQQSVAELVRP | WVKQRPEQGLEW | PKFQATATITVATSS | WGHGTSVTVSS |
| | GASVKLSCTA | (SEQ ID NO: 1615) | NSAYLQLSSLASEDT | (SEQ ID NO: 1627) |
| | (SEQ ID NO: 1607) | | AIYYC | |
| | | | (SEQ ID NO: 1620) | |
| 40D5v1 | EVQLVESGGGLVKP | WVRQTPEKRLEW | DSMKGRFTISRDNA | WGQGTTLTVSS |
| | GGSLKLSCEA | (SEQ ID NO: 995) | KNFLYLQMSSLRSE | (SEQ ID NO: 1031) |
| | (SEQ ID NO: 1539) | | DTAMYYC | |
| | | | (SEQ ID NO: 1542) | |
| 40D5v2 | QVQLQQSGAELVK | WVKQRPGQGLEW | QKFKGKATLTVDKS | WSQGTLVTVS |
| | PGASVKVSCKA | (SEQ ID NO: 1616) | SSTAYMQILSSLTSE | (SEQ ID NO: 1628) |
| | (SEQ ID NO: 1608) | | DSAVYYC | |
| | | | (SEQ ID NO: 1621) | |
| 43B9 | EVQLVESGGGLVKP | WVRQTPEKRLEW | DSMKGRFTISRDNA | WGQGTTLTVSS |
| | GGSLKLSCEA | (SEQ ID NO: 995) | KNFLYLQMSSLRSE | (SEQ ID NO: 1031) |
| | (SEQ ID NO: 1539) | | DTAMYYC | |
| | | | (SEQ ID NO: 1542) | |
| 44A8 | EVQLVESGGGLVKP | WVRQTPEKRLEW | DSMKGRFTISRDNA | WGQGTTLTVSS |
| | GGSLKLSCEA | (SEQ ID NO: 995) | KNFLYLQMSSLRSE | (SEQ ID NO: 1031) |
| | (SEQ ID NO: 1539) | | DTAMYYC | |
| | | | (SEQ ID NO: 1542) | |
| 44B4v1 | EVQLVESGGGLVKP | WVRQTPEKRLEW | DSMKGRFTISRDNA | WGQGTTLTVSS |
| | GGSLKLSCEA | (SEQ ID NO: 995) | KNFLYLQMSSLRSE | (SEQ ID NO: 1031) |
| | (SEQ ID NO: 1539) | | DTAMYYC | |
| | | | (SEQ ID NO: 1542) | |
| 44B4v2 | XXXXXQSGTELARP | WVKQRPGQGLEW | QKFKDKATLTADKS | WGTGTTVTVSS |
| | GASVKMPCKA | (SEQ ID NO: 1616) | SSTAYMQLSSLTSEE | (SEQ ID NO: 1033) |
| | (SEQ ID NO: 1609) | | SAVYYC | |
| | | | (SEQ ID NO: 1622) | |
| 45D6 | QVQLQQSGRELVKP | WVIQSHGESLEW | QKFKGKATLTVNKS | WGQGTSVTVSS |
| | GASVKMSCMSSG | (SEQ ID NO: 1617) | SSTAYMELRSLTSED | (SEQ ID NO: 1030) |
| | (SEQ ID NO: 1610) | | SAVYYC | |
| | | | (SEQ ID NO: 1623) | |
| 29F7 | QVKLEESGGGLVQP | WVRQSPEKGLEW | ESVKGRFTISRDDSK | WGQGTTLTVSS |
| | GGSMKLSCVASG | (SEQ ID NO: 998) | SSVYLQMNNLRAVD | (SEQ ID NO: 1031) |
| | (SEQ ID NO: 1611) | | TGIYYC | |
| | | | (SEQ ID NO: 1624) | |
| 32G1 | QVQLQQSGPELVKP | WVKQSHGKSLEW | QKFKGKATLTVNKS | WGQGTLVTVSA |
| | GASVQMSCEASG | (SEQ ID NO: 996) | SSTAYIELRSLTSEDS | (SEQ ID NO: 1029) |
| | (SEQ ID NO: 1612) | | AVYHC | |
| | | | (SEQ ID NO: 1625) | |

TABLE D7
Humanized light chain variable region sequences

| | |
|---|---|
| Antibody variant | Humanized sequences |

Antibody 4D11

| | |
|---|---|
| 4D11V3-15 | EIVMTQSPATLSVSPGERATLSCRASENIYSFLAWYQQKPGQAPRLLIY |
| | NSKTFAEGIPARFSGSGSGTEFTLTISSLQSEDFAVYYCQHHYGTPPWTF |
| | GQGTKVEIK (SEQ ID NO: 1040) |
| 4D11V1-9 | DIQLTQSPSFLSASVGDRVTITCRASENIYSFLAWYQQKPGKAPKLLI |
| | YNSKTFAEGVPSRFSGSGSGTEFTLTISSLQPEDFATYYCQHHYGTPP |
| | WTFGQGTKVEIK (SEQ ID NO: 1041) |
| 4D11V3-11 | EIVLTQSPATLSLSPGERATLSCRASENIYSFLAWYQQKPGQAPRLLIY |
| | NSKTFAEGIPARFSGSGSGTDFTLTISSLEPEDFAVYYCQHHYGTPPW |
| | TFGQGTKVEIK (SEQ ID NO: 1042) |
| 4D11V1-5 | DIQMTQSPSTLSASVGDRVTITCRASENIYSFLAWYQQKPGKAPKLLI |
| | YNSKTFAEGVPSRFSGSGSGTEFTLTISSLQPDDFATYYCQHHYGTPP |
| | WTFGQGTKVEIK (SEQ ID NO: 1043) |
| 4D11V1-39 | DIQMTQSPSSLSASVGDRVTITCRASENIYSFLAWYQQKPGKAPKLLI |
| | YNSKTFAEGVPSRFSGSGSGTDFTLTISSLQPEDFATYYCQHHYGTPP |
| | WTFGQGTKVEIK (SEQ ID NO: 1044) |
| 4D11V1-33 | DIQMTQSPSSLSASVGDRVTITCRASENIYSFLAWYQQKPGKAPKLLI |
| | YNSKTFAEGVPSRFSGSGSGTDFTFTISSLQPEDIATYYCQHHYGTPP |
| | WTFGQGTKVEIK (SEQ ID NO: 1045) |
| 4D11V3-20 | EIVLTQSPGTLSLSPGERATLSCRASENIYSFLAWYQQKPGQAPRLLIY |
| | NSKTFAEGIPDRFSGSGSGTDFTLTISRLEPEDFAVYYCQHHYGTPPW |
| | TFGQGTKVEIK (SEQ ID NO: 1046) |
| 4D11V2-28 | DIVMTQSPLSLPVTPGEPASISCRASENIYSFLAWYLQKPGQSPQLLIY |
| | NSKTFAEGVPDRFSGSGSGTDFTLKISRVEAEDVGVYYCQHHYGTPP |
| | WTFGQGTKVEIK (SEQ ID NO: 1047) |
| 4D11V2-30 | DVVMTQSPLSLPVTLGQPASISCRASENIYSFLAWFQQRPGQSPRRLI |
| | YNSKTFAEGVPDRFSGSGSGTDFTLKISRVEAEDVGVYYCQHHYGTP |
| | PWTFGQGTKVEIK (SEQ ID NO: 1048) |
| 4D11V4-1 | DIVMTQSPDSLAVSLGERATINCRASENIYSFLAWYQQKPGQPPKLLI |
| | YNSKTFAEGVPDRFSGSGSGTDFTLTISSLQAEDVAVYYCQHHYGTP |
| | PWTFGQGTKVEIK (SEQ ID NO: 1049) |

Antibody 7C5

| | |
|---|---|
| 7C5V3-15 | EIVMTQSPATLSVSPGERATLSCRASENIYSFLAWYQQKPGQAPRLLI |
| | YNSKTFAEGIPARFSGSGSGTEFTLTISSLQSEDFAVYYCQHHYGTPP |
| | WTFGQGTKVEIK (SEQ ID NO: 1040) |
| 7C5V1-9 | DIQLTQSPSFLSASVGDRVTITCRASENIYSFLAWYQQKPGKAPKLLI |
| | YNSKTFAEGVPSRFSGSGSGTEFTLTISSLQPEDFATYYCQHHYGTPP |
| | WTFGQGTKVEIK (SEQ ID NO: 1041) |
| 7C5V3-11 | EIVLTQSPATLSLSPGERATLSCRASENIYSFLAWYQQKPGQAPRLLIY |
| | NSKTFAEGIPARFSGSGSGTDFTLTISSLEPEDFAVYYCQHHYGTPPW |
| | TFGQGTKVEIK (SEQ ID NO: 1042) |
| 7C5V1-5 | DIQMTQSPSTLSASVGDRVTITCRASENIYSFLAWYQQKPGKAPKLLI |
| | YNSKTFAEGVPSRFSGSGSGTEFTLTISSLQPDDFATYYCQHHYGTPP |
| | WTFGQGTKVEIK (SEQ ID NO: 1043) |
| 7C5V1-39 | DIQMTQSPSSLSASVGDRVTITCRASENIYSFLAWYQQKPGKAPKLLI |
| | YNSKTFAEGVPSRFSGSGSGTDFTLTISSLQPEDFATYYCQHHYGTPP |
| | WTFGQGTKVEIK (SEQ ID NO: 1044) |
| 7C5V1-33 | DIQMTQSPSSLSASVGDRVTITCRASENIYSFLAWYQQKPGKAPKLLI |
| | YNSKTFAEGVPSRFSGSGSGTDFTFTISSLQPEDIATYYCQHHYGTPP |
| | WTFGQGTKVEIK (SEQ ID NO: 1045) |
| 7C5V3-20 | EIVLTQSPGTLSLSPGERATLSCRASENIYSFLAWYQQKPGQAPRLLIY |
| | NSKTFAEGIPDRFSGSGSGTDFTLTISRLEPEDFAVYYCQHHYGTPPW |
| | TFGQGTKVEIK (SEQ ID NO: 1046) |
| 7C5V2-28 | DIVMTQSPLSLPVTPGEPASISCRASENIYSFLAWYLQKPGQSPQLLIY |
| | NSKTFAEGVPDRFSGSGSGTDFTLKISRVEAEDVGVYYCQHHYGTPP |
| | WTFGQGTKVEIK (SEQ ID NO: 1047) |
| 7C5V2-30 | DVVMTQSPLSLPVTLGQPASISCRASENIYSFLAWFQQRPGQSPRRLI |
| | YNSKTFAEGVPDRFSGSGSGTDFTLKISRVEAEDVGVYYCQHHYGTP |
| | PWTFGQGTKVEIK (SEQ ID NO: 1048) |
| 7C5V4-1 | DIVMTQSPDSLAVSLGERATINCRASENIYSFLAWYQQKPGQPPKLLI |
| | YNSKTFAEGVPDRFSGSGSGTDFTLTISSLQAEDVAVYYCQHHYGTP |
| | PWTFGQGTKVEIK (SEQ ID NO: 1049) |

Antibody 6G12

| | |
|---|---|
| 6G12V4-1 | DIVMTQSPDSLAVSLGERATTNCKSSQSLLYSSNQKNCLAWYQQKPG |
| | QPPKLLIYWAFTRESGVPDRFSGSGSGTDFTLTISSLQAEDVAVYYCQ |
| | QYYSYPLTFGQGTKVEIK (SEQ ID NO: 1051) |
| 6G12V2-30 | DVVMTQSPLSLPVTLGQPASISCKSSQSLLYSSNQKNCLAWFQQRPG |
| | QSPRRLIYWAFTRESGVPDRFSGSGSGTDFTLKISRVEAEDVGVYYC |
| | QQYYSYPLTFGQGTKVEIK (SEQ ID NO: 1052) |
| 6G12V2-28 | DIVMTQSPLSLPVTPGEPASISCKSSQSLLYSSNQKNCLAWYLQKPG |
| | QSPQLLIYWAFTRESGVPDRFSGSGSGTDFTLKISRVEAEDVGVYYC |
| | QQYYSYPLTFGQGTKVEIK (SEQ ID NO: 1053) |
| 6G12V1-9 | DIQLTQSPSFLSASVGDRVTITCKSSQSLLYSSNQKNCLAWYQQKPG |
| | KAPKLLIYWAFTRESGVPSRFSGSGSGTEFTLTISSLQPEDFATYYCQ |
| | QYYSYPLTFGQGTKVEIK (SEQ ID NO: 1054) |
| 6G12V1-5 | DIQMTQSPSTLSASVGDRVTITCKSSQSLLYSSNQKNCLAWYQQKPG |
| | KAPKLLIYWAFTRESGVPSRFSGSGSGTEFTLTISSLQPDDFATYYCQ |
| | QYYSYPLTFGQGTKVEIK (SEQ ID NO: 1055) |
| 6G12V3-15 | EIVMTQSPATLSVSPGERATLSCKSSQSLLYSSNQKNCLAWYQQKPG |
| | QAPRLLIYWAFTRESGIPARFSGSGSGTEFTLTISSLQSEDFAVYYCQQ |
| | YYSYPLTFGQGTKVEIK (SEQ ID NO: 1056) |
| 6G12V1-33 | DIQMTQSPSSLSASVGDRVTITCKSSQSLLYSSNQKNCLAWYQQKPG |
| | KAPKLLIYWAFTRESGVPSRFSGSGSGTDFTFTISSLQPEDIATYYCQQ |
| | YYSYPLTFGQGTKVEIK (SEQ ID NO: 1057) |
| 6G12V1-39 | DIQMTQSPSSLSASVGDRVTITCKSSQSLLYSSNQKNCLAWYQQKPG |
| | KAPKLLIYWAFTRESGVPSRFSGSGSGTDFTLTISSLQPEDFATYYCQQ |
| | YYSYPLTFGQGTKVEIK (SEQ ID NO: 1058) |
| 6G12V3-11 | EIVLTQSPATLSLSPGERATLSCKSSQSLLYSSNQKNCLAWYQQKPG |
| | QAPRLLIYWAFTRESGIPARFSGSGSGTDFTLTISSLEPEDFAVYYCQQ |
| | YYSYPLTFGQGTKVEIK (SEQ ID NO: 1059) |
| 6G12V3-20 | EIVLTQSPGTLSLSPGERATLSCKSSQSLLYSSNQKNCLAWYQQKPG |
| | QAPRLLIYWAFTRESGIPDRFSGSGSGTDFTLTISRLEPEDFAVYYCQ |
| | QYYSYPLTFGQGTKVEIK (SEQ ID NO: 1060) |

Antibody 8F11

| | |
|---|---|
| 8F11V2-30 | DVVMTQSPLSLPVTLGQPASISCKSSQSLLYSNGKTFLSWFQQRPGQS |
| | PRRLIYLVSKLDSGVPDRFSGSGSGTDFTLKISRVEAEDVGVYYCMQ |
| | GTHFPLTFGQGTKVEIK (SEQ ID NO: 1062) |
| 8F11V2-28 | DIVMTQSPLSLPVTPGEPASISCKSSQSLLYSNGKTFLSWYLQKPGQS |
| | PQLLIYLVSKLDSGVPDRFSGSGSGTDFTLKISRVEAEDVGVYYCMQ |
| | GTHFPLTFGQGTKVEIK (SEQ ID NO: 1063) |
| 8F11V4-1 | DIVMTQSPDSLAVSLGERATINCKSSQSLLYSNGKTFLSWYQQKPGQ |
| | PPKWYLVSKLDSGVPDRFSGSGSGTDFTLTISSLQAEDVAVYYCMQ |
| | GTHFPLTFGQGTKVEIK (SEQ ID NO: 1064) |
| 8F11V1-5 | DIQMTQSPSTLSASVGDRVTITCKSSQSLLYSNGKTFLSWYQQKPGK |
| | APKWYLVSKLDSGVPSRFSGSGSGTEFTLTISSLQPDDFATYYCMQ |
| | GTHFPLTFGQGTKVEIK (SEQ ID NO: 1065) |
| 8F11V1-9 | DIQLTQSPSFLSASVGDRVTITCKSSQSLLYSNGKTFLSWYQQKPGK |
| | APKWYLVSKLDSGVPSRFSGSGSGTEFTLTISSLQPEDFATYYCMQ |
| | GTHFPLTFGQGTKVEIK (SEQ ID NO: 1066) |
| 8F11V1-39 | DIQMTQSPSSLSASVGDRVTITCKSSQSLLYSNGKTFLSWYQQKPGK |
| | APKWYLVSKLDSGVPSRFSGSGSGTDFTLTISSLQPEDFATYYCMQ |
| | GTHFPLTFGQGTKVEIK (SEQ ID NO: 1067) |
| 8F11V1-33 | DIQMTQSPSSLSASVGDRVTITCKSSQSLLYSNGKTFLSWYQQKPGK |
| | APKWYLVSKLDSGVPSRFSGSGSGTDFTFTISSLQPEDIATYYCMQG |
| | THFPLTFGQGTKVEIK (SEQ ID NO: 1068) |
| 8F11V3-15 | EIVMTQSPATLSVSPGERATLSCKSSQSLLYSNGKTFLSWYQQKPGQ |
| | APRLLIYLVSKLDSGIPARFSGSGSGTEFTLTISSLQSEDFAVYYCMQG |
| | THFPLTFGQGTKVEIK (SEQ ID NO: 1069) |
| 8F11V3-11 | EIVLTQSPATLSLSPGERATLSCKSSQSLLYSNGKTFLSWYQQKPGQ |
| | APRLLIYLVSKLDSGIPARFSGSGSGTDFTLTISSLEPEDFAVYYCMQ |
| | GTHFPLTFGQGTKVEIK (SEQ ID NO: 1070) |
| 8F11V3-20 | EIVLTQSPGTLSLSPGERATLSCKSSQSLLYSNGKTFLSWYQQKPGQA |
| | PRLLIYLVSKLDSGIPDRFSGSGSGTDFTLTISRLEPEDFAVYYCMQG |
| | THFPLTFGQGTKVEIK (SEQ ID NO: 1071) |

Antibody 8E10

| | |
|---|---|
| 8E10V2-30 | DVVMTQSPLSLPVTLGQPASISCKSSQSLLDSDGKTYLNWFQQRPGQ |
| | SPRRLIYLVSKLDSGVPDRFSGSGSGTDFTLKISRVEAEDVGVYYCWQ |
| | GTHFPYTFGQGTKVEIK (SEQ ID NO: 1073) |
| 8E10V2-28 | DIVMTQSPLSLPVTPGEPASISCKSSQSLLDSDGKTYLNWYLQKPGQS |
| | PQLLIYLVSKLDSGVPDRFSGSGSGTDFTLKISRVEAEDVGVYYCWQ |
| | GTHFPYTFGQGTKVEIK (SEQ ID NO: 1074) |
| 8E10V4-1 | DIVMTQSPDSLAVSLGERATINCKSSQSLLDSDGKTYLNWYQQKPGQ |
| | PPKWYLVSKLDSGVPDRFSGSGSGTDFTLTISSLQAEDVAVYYCWQ |
| | GTHFPYTFGQGTKVEIK (SEQ ID NO: 1075) |
| 8E10V1-9 | DIQLTQSPSFLSASVGDRVTITCKSSQSLLDSDGKTYLNWYQQKPGK |
| | APKWYLVSKLDSGVPSRFSGSGSGTEFTLTISSLQPEDFATYYCWQG |
| | THFPYTFGQGTKVEIK (SEQ ID NO: 1076) |
| 8E10V1-5 | DIQMTQSPSTLSASVGDRVTITCKSSQSLLDSDGKTYLNWYQQKPGK |
| | APKWYLVSKLDSGVPSRFSGSGSGTEFTLTISSLQPDDFATYYCWQ |
| | GTHFPYTFGQGTKVEIK (SEQ ID NO: 1077) |
| 8E10V1-39 | DIQMTQSPSSLSASVGDRVTITCKSSQSLLDSDGKTYLNWYQQKPGK |
| | APKWYLVSKLDSGVPSRFSGSGSGTDFTLTISSLQPEDFATYYCWQ |
| | GTHFPYTFGQGTKVEIK (SEQ ID NO: 1078) |
| 8E10V1-33 | DIQMTQSPSSLSASVGDRVTITCKSSQSLLDSDGKTYLNWYQQKPGK |
| | APKWYLVSKLDSGVPSRFSGSGSGTDFTFTISSLQPEDIATYYCWQ |
| | GTHFPYTFGQGTKVEIK (SEQ ID NO: 1079) |
| 8E10V3-11 | EIVLTQSPATLSLSPGERATLSCKSSQSLLDSDGKTYLNWYQQKPGQ |
| | APRLLIYLVSKLDSGIPARFSGSGSGTDFTLTISSLEPEDFAVYYCWQG |
| | THFPYTFGQGTKVEIK (SEQ ID NO: 1080) |
| 8E10V3-15 | EIVMTQSPATLSVSPGERATLSCKSSQSLLDSDGKTYLNWYQQKPGQ |
| | APRLLIYLVSKLDSGIPARFSGSGSGTEFTLTISSLQSEDFAVYYCWQ |
| | GTHFPYTFGQGTKVEIK (SEQ ID NO: 1081) |
| 8E10V3-20 | EIVLTQSPGTLSLSPGERATLSCKSSQSLLDSDGKTYLNWYQQKPGQ |
| | APRLLIYLVSKLDSGIPDRFSGSGSGTDFTLTISRLEPEDFAVYYCWQ |
| | GTHFPYTFGQGTKVEIK (SEQ ID NO: 1082) |

Antibody 7E5

| | |
|---|---|
| 7E5V2-30 | DVVMTQSPLSLPVTLGQPASISCKSSQSLLYSNGKTFLSWFQQRPGQS |
| | PRRLIYLVSKLDSGVPDRFSGSGSGTDFTLKISRVEAEDVGVYYCMQ |
| | GTHFPLTFGQGTKVEIK (SEQ ID NO: 1062) |
| 7E5V2-28 | DIVMTQSPLSLPVTPGEPASISCKSSQSLLYSNGKTFLSWYLQKPGQS |
| | PQLLIYLVSKLDSGVPDRFSGSGSGTDFTLKISRVEAEDVGVYYCMQ |
| | GTHFPLTFGQGTKVEIK (SEQ ID NO: 1063) |
| 7E5V4-1 | DIVMTQSPDSLAVSLGERATINCKSSQSLLYSNGKTFLSWYQQKPGQ |
| | PPKWYLVSKLDSGVPDRFSGSGSGTDFTLTISSLQAEDVAVYYCMQ |
| | GTHFPLTFGQGTKVEIK (SEQ ID NO: 1064) |
| 7E5V1-5 | DIQMTQSPSTLSASVGDRVTITCKSSQSLLYSNGKTFLSWYQQKPGK |
| | APKWYLVSKLDSGVPSRFSGSGSGTEFTLTISSLQPDDFATYYCMQG |
| | THFPLTFGQGTKVEIK (SEQ ID NO: 1065) |
| 7E5V1-9 | DIQLTQSPSFLSASVGDRVTITCKSSQSLLYSNGKTFLSWYQQKPGK |
| | APKLLIYLVSKLDSGVPSRFSGSGSGTEFTLTISSLQPEDFATYYCMQ |
| | GTHFPLTFGQGTKVEIK (SEQ ID NO: 1066) |
| 7E5V1-39 | DIQMTQSPSSLSASVGDRVTITCKSSQSLLYSNGKTFLSWYQQKPGKA |
| | PKWYLVSKLDSGVPSRFSGSGSGTDFTLTISSLQPEDFATYYCMQGT |
| | HFPLTFGQGTKVEIK (SEQ ID NO: 1067) |
| 7E5V1-33 | DIQMTQSPSSLSASVGDRVTITCKSSQSLLYSNGKTFLSWYQQKPGKA |
| | PKWYLVSKLDSGVPSRFSGSGSGTDFTFTISSLQPEDIATYYCMQGT |
| | HFPLTFGQGTKVEIK (SEQ ID NO: 1068) |
| 7E5V3-15 | EIVMTQSPATLSVSPGERATLSCKSSQSLLYSNGKTFLSWYQQKPGQ |
| | APRLLIYLVSKLDSGIPARFSGSGSGTEFTLTISSLQSEDFAVYYCMQG |
| | THFPLTFGQGTKVEIK (SEQ ID NO: 1069) |
| 7E5V3-11 | EIVLTQSPATLSLSPGERATLSCKSSQSLLYSNGKTFLSWYQQKPGQA |
| | PRLLIYLVSKLDSGIPARFSGSGSGTDFTLTISSLEPEDFAVYYCMQGT |
| | HFPLTFGQGTKVEIK (SEQ ID NO: 1070) |
| 7E5V3-20 | EIVLTQSPGTLSLSPGERATLSCKSSQSLLYSNGKTFLSWYQQKPGQA |
| | PRLLIYLVSKLDSGIPDRFSGSGSGTDFTLTISRLEPEDFAVYYCMQG |
| | THFPLTFGQGTKVEIK (SEQ ID NO: 1071) |

Antibody 7F8

| | |
|---|---|
| 7F8V3-11 | EIVLTQSPATLSLSPGERATLSCSASSSVSYMYWYQQKPGQAPRLLIYL |
| | TSILASGIPARFSGSGSGTDFTLTISSLEPEDFAVYYCQQWSFNPYTFGQ |
| | GTKVEIK (SEQ ID NO: 1084) |
| 7F8V1-39 | DIQMTQSPSSLSASVGDRVTITCSASSSVSYMYWYQQKPGKAPKLLI |
| | YLTSILASGVPSRFSGSGSGTDFTLTISSLQPEDFATYYCQQWSFNPYT |
| | FGQGTKVEIK (SEQ ID NO: 1085) |
| 7F8V1-5 | DIQMTQSPSTLSASVGDRVTITCSASSSVSYMYWYQQKPGKAPKLLI |
| | YLTSILASGVPSRFSGSGSGTEFTLTISSLQPDDFATYYCQQWSFNPYT |
| | FGQGTKVEIK (SEQ ID NO: 1086) |
| 7F8V3-15 | EIVMTQSPATLSVSPGERATLSCSASSSVSYMYWYQQKPGQAPRLLI |
| | YLTSILASGIPARFSGSGSGTEFTLTISSLQSEDFAVYYCQQWSFNPYT |
| | FGQGTKVEIK (SEQ ID NO: 1087) |
| 7F8V1-9 | DIQLTQSPSFLSASVGDRVTITCSASSSVSYMYWYQQKPGKAPKWYL |
| | TSILASGVPSRFSGSGSGTEFTLTISSLQPEDFATYYCQQWSFNPYTFGQ |
| | GTKVEIK (SEQ ID NO: 1088) |
| 7F8V1-33 | DIQMTQSPSSLSASVGDRVTITCSASSSVSYMYWYQQKPGKAPKLLI |
| | YLTSILASGVPSRFSGSGSGTDFTFTISSLQPEDIATYYCQQWSFNPYT |
| | FGQGTKVEIK (SEQ ID NO: 1089) |
| 7F8V3-20 | EIVLTQSPGTLSLSPGERATLSCSASSSVSYMYWYQQKPGQAPRLLIYL |
| | TSILASGIPDRFSGSGSGTDFTLTISRLEPEDFAVYYCQQWSFNPYTFGQ |
| | GTKVEIK (SEQ ID NO: 1090) |
| 7F8V2-28 | DIVMTQSPLSLPVTPGEPASISCSASSSVSYMYWYLQKPGQSPQLLIY |
| | LTSILASGVPDRFSGSGSGTDFTLKISRVEAEDVGVYYCQQWSFNPY |
| | TFGQGTKVEIK (SEQ ID NO: 1091) |
| 7F8V2-30 | DVVMTQSPLSLPVTLGQPASISCSASSSVSYMYWFQQRPGQSPRRLIY |
| | LTSILASGVPDRFSGSGSGTDFTLKISRVEAEDVGVYYCQQWSFNPYT |
| | FGQGTKVEIK (SEQ ID NO: 1092) |
| 7F8V4-1 | DIVMTQSPDSLAVSLGERATINCSASSSVSYMYWYQQKPGQPPKLLI |
| | YLTSILASGVPDRFSGSGSGTDFTLTISSLQAEDVAVYYCQQWSFNPY |
| | TFGQGTKVEIK (SEQ ID NO: 1093) |

Antibody 8F8

| | |
|---|---|
| 8F8V2-30 | DVVMTQSPLSLPVTLGQPASISCRSSQSLVHSNGNTYLHWFQQRPGQS |
| | PRRLIYKVSNRFSGVPDRFSGSGSGTDFTLKISRVEAEDVGVYYCSQS |
| | THVPLTFGQGTKVEIK (SEQ ID NO: 1095) |
| 8F8V2-28 | DIVMTQSPLSLPVTPGEPASISCRSSQSLVHSNGNTYLHWYLQKPGQ |
| | SPQLLIYKVSNRFSGVPDRFSGSGSGTDFTLKISRVEAEDVGVYYCSQ |
| | STHVPLTFGQGTKVEIK (SEQ ID NO: 1096) |
| 8F8V4-1 | DIVMTQSPDSLAVSLGERATINCRSSQSLVHSNGNTYLHWYQQKPGQ |
| | PPKWYKVSNRFSGVPDRFSGSGSGTDFTLTISSLQAEDVAVYYCSQS |
| | THVPLTFGQGTKVEIK (SEQ ID NO: 1097) |
| 8F8V3-11 | EIVLTQSPATLSLSPGERATLSCRSSQSLVHSNGNTYLHWYQQKPGQ |
| | APRLLIYKVSNRFSGIPARFSGSGSGTDFTLTISSLEPEDFAVYYCSQST |
| | HVPLTFGQGTKVEIK (SEQ ID NO: 1098) |
| 8F8V1-39 | DIQMTQSPSSLSASVGDRVTITCRSSQSLVHSNGNTYLHWYQQKPGK |
| | APKWYKVSNRFSGVPSRFSGSGSGTDFTLTISSLQPEDFATYYCSQS |
| | THVPLTFGQGTKVEIK (SEQ ID NO: 1099) |
| 8F8V1-33 | DIQMTQSPSSLSASVGDRVTITCRSSQSLVHSNGNTYLHWYQQKPGK |
| | APKLLIYKVSNRFSGVPSRFSGSGSGTDFTFTISSLQPEDIATYYCSQST |
| | HVPLTFGQGTKVEIK (SEQ ID NO: 1100) |
| 8F8V3-15 | EIVMTQSPATLSVSPGERATLSCRSSQSLVHSNGNTYLHWYQQKPGQA |
| | PRLLIYKVSNRFSGIPARFSGSGSGTEFTLTISSLQSEDFAVYYCSQSTHVP |
| | LTFGQGTKVEIK (SEQ ID NO: 1101) |
| 8F8V1-5 | DIQMTQSPSTLSASVGDRVTITCRSSQSLVHSNGNTYLHWYQQKPGK |
| | APKWYKVSNRFSGVPSRFSGSGSGTEFTLTISSLQPDDFATYYCSQS |
| | THVPLTFGQGTKVEIK (SEQ ID NO: 1102) |
| 8F8V1-9 | DIQLTQSPSFLSASVGDRVTITCRSSQSLVHSNGNTYLHWYQQKPGK |
| | APKWYKVSNRFSGVPSRFSGSGSGTEFTLTISSLQPEDFATYYCSQST |
| | HVPLTFGQGTKVEIK (SEQ ID NO: 1103) |
| 8F8V3-20 | EIVLTQSPGTLSLSPGERATLSCRSSQSLVHSNGNTYLHWYQQKPGQA |
| | PRLLIYKVSNRFSGIPDRFSGSGSGTDFTLTISRLEPEDFAVYYCSQSTH |
| | VPLTFGQGTKVEIK (SEQ ID NO: 1104) |

Antibody1H7

| | |
|---|---|
| 1H7V1-39 | DIQMTQSPSSLSASVGDRVTITCSASSSVSYMYWYQQKPGKAPKLLI |
| | YLTSILASGVPSRFSGSGSGTDFTLTISSLQPEDFATYYCQQWSFNPY |
| | TFGQGTKVEIK (SEQ ID NO: 1085) |
| 1H7V3-11 | EIVLTQSPATLSLSPGERATLSCSASSSVSYMYWYQQKPGQAPRLLIYL |
| | TSILASGIPARFSGSGSGTDFTLTISSLEPEDFAVYYCQQWSFNPYTFGQ |
| | GTKVEIK (SEQ ID NO: 1084) |
| 1H7V1-5 | DIQMTQSPSTLSASVGDRVTITCSASSSVSYMYWYQQKPGKAPKLLI |
| | YLTSILASGVPSRFSGSGSGTEFTLTISSLQPDDFATYYCQQWSFNP |
| | YTFGQGTK VEIK (SEQ ID NO: 1086) |
| 1H7V1-9 | DIQLTQSPSFLSASVGDRVTITCSASSSVSYMYWYQQKPGKAPKWYL |
| | TSILASGVPSRFSGSGSGTEFTLTISSLQPEDFATYYCQQWSFNPYTFGQ |
| | GTKVEIK (SEQ ID NO: 1088) |
| 1H7V3-15 | EIVMTQ SPATLSVSPGERATLSCSASSSVSYMYWYQQKPGQAPRLLI |
| | YLTSILASGIPARFSGSGSGTEFTLTISSLQSEDFAVYYCQQWSFNPYT |
| | FGQGTKVEIK (SEQ ID NO: 1087) |
| 1H7V1-33 | DIQMTQSPSSLSASVGDRVTITCSASSSVSYMYWYQQKPGKAPKLLI |
| | YLTSILASGVPSRFSGSGSGTDFTFTISSLQPEDIATYYCQQWSFNPYT |
| | FGQGTKVEIK (SEQ ID NO: 1089) |
| 1H7V3-20 | EIVLTQSPGTLSLSPGERATLSCSASSSVSYMYWYQQKPGQAPRLLIYL |
| | TSILASGIPDRFSGSGSGTDFTLTISRLEPEDFAVYYCQQWSFNPYTFGQ |
| | GTKVEIK (SEQ ID NO: 1090) |
| 1H7V2-28 | DIVMTQSPLSLPVTPGEPASISCSASSSVSYMYWYLQKPGQSPQLLIY |
| | LTSILASGVPDRFSGSGSGTDFTLKISRVEAEDVGVYYCQQWSFNPY |
| | TFGQGTKVEIK (SEQ ID NO: 1091) |
| 1H7V2-30 | DVVMTQSPLSLPVTLGQPASISCSASSSVSYMYWFQQRPGQSPRRLIY |
| | LTSILASGVPDRFSGSGSGTDFTLKISRVEAEDVGVYYCQQWSFNPYT |
| | FGQGTKVEIK (SEQ ID NO: 1092) |
| 1H7V4-1 | DIVMTQSPDSLAVSLGERATTNCSASSSVSYMYWYQQKPGQPPKLLI |
| | YLTSILASGVPDRFSGSGSGTDFTLTISSLQAEDVAVYYCQQWSFNPY |
| | TFGQGTKVEIK (SEQ ID NO: 1093) |

Antibody 2H8

| | |
|---|---|
| 2H8V3-11 | EIVLTQSPATLSLSPGERATLSCSASSSVSYMYWYQQKPGQAPRLLIYL |
| | TSILASGIPARFSGSGSGTDFTLTISSLEPEDFAVYYCQQWSFNPYTFGQ |
| | GTKVEIK (SEQ ID NO: 1084) |
| 2H8V1-39 | DIQMTQSPSSLSASVGDRVTITCSASSSVSYMYWYQQKPGKAPKLLI |
| | YLTSILASGVPSRFSGSGSGTDFTLTISSLQPEDFATYYCQQWSFNPY |
| | TFGQGTKVEIK (SEQ ID NO: 1085) |
| 2H8V1-5 | DIQMTQSPSTLSASVGDRVTITCSASSSVSYMYWYQQKPGKAPKLLI |
| | YLTSILASGVPSRFSGSGSGTEFTLTISSLQPDDFATYYCQQWSFNPYT |
| | FGQGTKVEIK (SEQ ID NO: 1086) |
| 2H8V3-15 | EIVMTQSPATLSVSPGERATLSCSASSSVSYMYWYQQKPGQAPRLLI |
| | YLTSILASGIPARFSGSGSGTEFTLTISSLQSEDFAVYYCQQWSFNPYT |
| | FGQGTKVEIK (SEQ ID NO: 1087) |
| 2H8V1-9 | DIQLTQSPSFLSASVGDRVTITCSASSSVSYMYWYQQKPGKAPKWYL |
| | TSILASGVPSRFSGSGSGTEFTLTISSLQPEDFATYYCQQWSFNPYTFGQ |
| | GTKVEIK (SEQ ID NO: 1088) |
| 2H8V1-33 | DIQMTQSPSSLSASVGDRVTITCSASSSVSYMYWYQQKPGKAPKLLI |
| | YLTSILASGVPSRFSGSGSGTDFTFTISSLQPEDIATYYCQQWSFNPYT |
| | FGQGTKVEIK (SEQ ID NO: 1089) |
| 2H8V3-20 | EIVLTQSPGTLSLSPGERATLSCSASSSVSYMYWYQQKPGQAPRLLIYL |
| | TSILASGIPDRFSGSGSGTDFTLTISRLEPEDFAVYYCQQWSFNPYTFGQ |
| | GTKVEIK (SEQ ID NO: 1090) |
| 2H8V2-28 | DIVMTQSPLSLPVTPGEPASISCSASSSVSYMYWYLQKPGQSPQLLIY |
| | LTSILASGVPDRFSGSGSGTDFTLKISRVEAEDVGVYYCQQWSFNPY |
| | TFGQGTKVEIK (SEQ ID NO: 1091) |
| 2H8V2-30 | DVVMTQSPLSLPVTLGQPASISCSASSSVSYMYWFQQRPGQSPRRLIY |
| | LTSILASGVPDRFSGSGSGTDFTLKISRVEAEDVGVYYCQQWSFNPYT |
| | FGQGTKVEIK (SEQ ID NO: 1092) |
| 2H8V4-1 | DIVMTQSPDSLAVSLGERATINCSASSSVSYMYWYQQKPGQPPKLLI |
| | YLTSILASGVPDRFSGSGSGTDFTLTISSLQAEDVAVYYCQQWSFNPY |
| | TFGQGTKVEIK (SEQ ID NO: 1093) |

Antibody 3A2

| | |
|---|---|
| 3A2 V2-30 | DVVMTQSPLSLPVTLGQPASISCRSSQTIIHSNGNTYLEWFQQRPGQS |
| | PRRLIYKVSNRFSGVPDRFSGSGSGTDFTLKISRVEAEDVGVYYCFQG |
| | SHVPYTFGQGTKVEIK (SEQ ID NO: 1108) |
| 3A2 V2-28 | DIVMTQSPLSLPVTPGEPASISCRSSQTIIHSNGNTYLEWYLQKPGQSP |
| | QLLIYKVSNRFSGVPDRFSGSGSGTDFTLKISRVEAEDVGVYYCFQGS |
| | HVPYTFGQGTKVEIK (SEQ ID NO: 1109) |
| 3A2 V4-1 | DIVMTQSPDSLAVSLGERATINCRSSQTIIHSNGNTYLEWYQQKPGQ |
| | PPKWYKVSNRFSGVPDRFSGSGSGTDFTLTISSLQAEDVAVYYCFQ |
| | GSHVPYTFGQGTKVEIK (SEQ ID NO: 1110) |
| 3A2 V3-11 | EIVLTQSPATLSLSPGERATLSCRSSQTIIHSNGNTYLEWYQQKPGQAP |
| | RLLIYKVSNRFSGIPARFSGSGSGTDFTLTISSLEPEDFAVYYCFQGSH |
| | VPYTFGQGTKVEIK (SEQ ID NO: 1111) |
| 3A2 I-9 | DIQLTQSPSFLSASVGDRVTITCRSSQTIIHSNGNTYLEWYQQKPGKA |
| | PKWYKVSNRFSGVPSRFSGSGSGTEFTLTISSLQPEDFATYYCFQGS |
| | HVPYTFGQGTKVEIK (SEQ ID NO: 1112) |
| 3A2 I-33 | DIQMTQSPSSLSASVGDRVTITCRSSQTIIHSNGNTYLEWYQQKPGK |
| | APKWYKVSNRFSGVPSRFSGSGSGTDFTFTISSLQPEDIATYYCFQG |
| | SHVPYTFGQGTKVEIK (SEQ ID NO: 1113) |
| 3A2 VI-39 | DIQMTQSPSSLSASVGDRVTITCRSSQTIIHSNGNTYLEWYQQKPGKA |
| | PKWYKVSNRFSGVPSRFSGSGSGTDFTLTISSLQPEDFATYYCFQGS |
| | HVPYTFGQGTKVEIK (SEQ ID NO: 1114) |
| 3A2 V3-15 | EIVMTQSPATLSVSPGERATLSCRSSQTIIHSNGNTYLEWYQQKPGQ |
| | APRLLIYKVSNRFSGIPARFSGSGSGTEFTLTISSLQSEDFAVYYCFQG |
| | SHVPYTFGQGTKVEIK (SEQ ID NO: 1115) |
| 3A2 VI-5 | DIQMTQSPSTLSASVGDRVTITCRSSQTIIHSNGNTYLEWYQQKPGK |
| | APKWYKVSNRFSGVPSRFSGSGSGTEFTLTISSLQPDDFATYYCFQG |
| | SHVPYTFGQGTKVEIK (SEQ ID NO: 1116) |
| 3A2 V3-20 | EIVLTQSPGTLSLSPGERATLSCRSSQTIIHSNGNTYLEWYQQKPGQA |
| | PRLLIYKVSNRFSGIPDRFSGSGSGTDFTLTISRLEPEDFAVYYCFQGS |
| | HVPYTFGQGTKVEIK (SEQ ID NO: 1117) |

Antibody 3A7

| | |
|---|---|
| 3A7 V2-30 | DVVMTQSPLSLPVTLGQPASISCKSSQSLLYSNGKTFLSWFQQRPGQS |
| | PRRLIYLVSKLDSGVPDRFSGSGSGTDFTLKISRVEAEDVGVYYCMQ |
| | GTHFPLTFGQGTKVEIK (SEQ ID NO: 1062) |
| 3A7 V2-28 | DIVMTQSPLSLPVTPGEPASISCKSSQSLLYSNGKTFLSWYLQKPGQS |
| | PQLLIYLVSKLDSGVPDRFSGSGSGTDFTLKISRVEAEDVGVYYCMQ |
| | GTHFPLTFGQGTKVEIK (SEQ ID NO: 1063) |
| 3A7 V4-1 | DIVMTQSPDSLAVSLGERATINCKSSQSLLYSNGKTFLSWYQQKPGQ |
| | PPKWYLVSKLDSGVPDRFSGSGSGTDFTLTISSLQAEDVAVYYCMQ |
| | GTHFPLTFGQGTKVEIK (SEQ ID NO: 1064) |
| 3A7 VI-39 | DIQMTQSPSSLSASVGDRVTITCKSSQSLLYSNGKTFLSWYQQKPGK |
| | APKLLIYLVSKLDSGVPSRFSGSGSGTDFTLTISSLQPEDFATYYCMQ |
| | GTHFPLTFGQGTKVEIK (SEQ ID NO: 1067) |
| 3A7 I-9 | DIQLTQSPSFLSASVGDRVTITCKSSQSLLYSNGKTFLSWYQQKPGK |
| | APKLLIYLVSKLDSGVPSRFSGSGSGTEFTLTISSLQPEDFATYYCMQ |
| | GTHFPLTFGQGTKVEIK (SEQ ID NO: 1066) |
| 3A7 I-5 | DIQMTQSPSTLSASVGDRVTITCKSSQSLLYSNGKTFLSWYQQKPGK |
| | APKLLIYLVSKLDSGVPSRFSGSGSGTEFTLTISSLQPDDFATYYCMQ |
| | GTHFPLTFGQGTKVEIK (SEQ ID NO: 1065) |
| 3A7 VI-33 | DIQMTQSPSSLSASVGDRVTITCKSSQSLLYSNGKTFLSWYQQKPGK |
| | APKLLIYLVSKLDSGVPSRFSGSGSGTDFTFTISSLQPEDIATYYCMQG |
| | THFPLTFGQGTKVEIK (SEQ ID NO: 1068) |
| 3A7 V3-15 | EIVMTQSPATLSVSPGERATLSCKSSQSLLYSNGKTFLSWYQQKPGQ |
| | APRLLIYLVSKLDSGIPARFSGSGSGTEFTLTISSLQSEDFAVYYCMQG |
| | THFPLTFGQGTKVEIK (SEQ ID NO: 1069) |
| 3A7 V3-11 | EIVLTQSPATLSLSPGERATLSCKSSQSLLYSNGKTFLSWYQQKPGQ |
| | APRLLIYLVSKLDSGIPARFSGSGSGTDFTLTISSLEPEDFAVYYCMQ |
| | GTHFPLTFGQGTKVEIK (SEQ ID NO: 1070) |
| 3A7 V3-20 | EIVLTQSPGTLSLSPGERATLSCKSSQSLLYSNGKTFLSWYQQKPGQ |
| | APRLLIYLVSKLDSGIPDRFSGSGSGTDFTLTISRLEPEDFAVYYCMQ |
| | GTHFPLTFGQGTKVEIK (SEQ ID NO: 1071) |

Antibody 3B10

| | |
|---|---|
| 3B10V4-1 | DIVMTQSPDSLAVSLGERATINCKSSQSLLYSSDQKNYLAWYQQKPG |
| | QPPKLLIYWASTRESGVPDRFSGSGSGTDFTLTISSLQAEDVAVYYCQ |
| | QYYSYPLTFGQGTKVEIK (SEQ ID NO: 1120) |
| 3B10V2-28 | DIVMTQSPLSLPVTPGEPASISCKSSQSLLYSSDQKNYLAWYLQKPG |
| | QSPQLLIYWASTRESGVPDRFSGSGSGTDFTLKISRVEAEDVGVYYC |
| | QQYYSYPLTFGQGTKVEIK (SEQ ID NO: 1121) |
| 3B10V2-30 | DVVMTQSPLSLPVTLGQPASISCKSSQSLLYSSDQKNYLAWFQQRPG |
| | QSPRRLIYWASTRESGVPDRFSGSGSGTDFTLKISRVEAEDVGVYYC |
| | QQYYSYPLTFGQGTKVEIK (SEQ ID NO: 1122) |
| 3B10V1-5 | DIQMTQSPSTLSASVGDRVTITCKSSQSLLYSSDQKNYLAWYQQKPG |
| | KAPKLLIYWASTRESGVPSRFSGSGSGTEFTLTISSLQPDDFATYYCQ |
| | QYYSYPLTFGQGTKVEIK (SEQ ID NO: 1123) |
| 3B10V1-9 | DIQLTQSPSFLSASVGDRVTITCKSSQSLLYSSDQKNYLAWYQQKPG |
| | KAPKLLIYWASTRESGVPSRFSGSGSGTEFTLTISSLQPEDFATYYCQQ |
| | YYSYPLTFGQGTKVEIK (SEQ ID NO: 1124) |
| 3B10V3-15 | EIVMTQSPATLSVSPGERATLSCKSSQSLLYSSDQKNYLAWYQQKPG |
| | QAPRLLIYWASTRESGIPARFSGSGSGTEFTLTISSLQSEDFAVYYCQQ |
| | YYSYPLTFGQGTKVEIK (SEQ ID NO: 1125) |
| 3B10V1-39 | DIQMTQSPSSLSASVGDRVTITCKSSQSLLYSSDQKNYLAWYQQKPG |
| | KAPKLLIYWASTRESGVPSRFSGSGSGTDFTLTISSLQPEDFATYYCQQ |
| | YYSYPLTFGQGTKVEIK (SEQ ID NO: 1126) |
| 3B10V3-11 | EIVLTQSPATLSLSPGERATLSCKSSQSLLYSSDQKNYLAWYQQKPG |
| | QAPRLLIYWASTRESGIPARFSGSGSGTDFTLTISSLEPEDFAVYYCQQ |
| | YYSYPLTFGQGTKVEIK (SEQ ID NO: 1127) |
| 3B10v1-33 | DIQMTQSPSSLSASVGDRVTITCKSSQSLLYSSDQKNYLAWYQQKPG |
| | KAPKLLIYWASTRESGVPSRFSGSGSGTDFTFTISSLQPEDIATYYCQQ |
| | YYSYPLTFGQGTKVEIK (SEQ ID NO: 1128) |
| 3B10V3-20 | EIVLTQSPGTLSLSPGERATLSCKSSQSLLYSSDQKNYLAWYQQKPG |
| | QAPRLLIYWASTRESGIPDRFSGSGSGTDFTLTISRLEPEDFAVYYCQ |
| | QYYSYPLTFGQGTKVEIK (SEQ ID NO: 1129) |

Antibody 4F11

| | |
|---|---|
| 4F11V2-30 | DVVMTQSPLSLPVTLGQPASISCRSSQTIIHSNGNTYLEWFQQRPGQS |
| | PRRLIYKVSNRFSGVPDRFSGSGSGTDFTLKISRVEAEDVGVYYCFQ |
| | GSHVPYTFGQGTKVEIK (SEQ ID NO: 1108) |
| 4F11V2-28 | DIVMTQSPLSLPVTPGEPASISCRSSQTIIHSNGNTYLEWYLQKPGQSP |
| | QLLIYKVSNRFSGVPDRFSGSGSGTDFTLKISRVEAEDVGVYYCFQG |
| | SHVPYTFGQGTKVEIK (SEQ ID NO: 1109) |
| 4F11V4-1 | DIVMTQSPDSLAVSLGERATINCRSSQTIIHSNGNTYLEWYQQKPGQPP |
| | KLLIYKVSNRFSGVPDRFSGSGSGTDFTLTISSLQAEDVAVYYCFQGSHV |
| | PYTFGQGTKVEIK(SEQ ID NO: 1110) |
| 4F11V3-11 | EIVLTQSPATLSLSPGERATLSCRSSQTIIHSNGNTYLEWYQQKPGQAP |
| | RLLIYKVSNRFSGIPARFSGSGSGTDFTLTISSLEPEDFAVYYCFQGSHV |
| | PYTFGQGTKVEIK (SEQ ID NO: 1111) |
| 4F11V3-15 | EIVMTQSPATLSVSPGERATLSCRSSQTIIHSNGNTYLEWYQQKPGQ |
| | APRLLIYKVSNRFSGIPARFSGSGSGTEFTLTISSLQSEDFAVYYCFQG |
| | SHVPYTFGQGTKVEIK (SEQ ID NO: 1115) |
| 4F11V1-33 | DIQMTQSPSSLSASVGDRVTITCRSSQTIIHSNGNTYLEWYQQKPGK |
| | APKWYKVSNRFSGVPSRFSGSGSGTDFTFTISSLQPEDIATYYCFQG |
| | SHVPYTFGQGTKVEIK (SEQ ID NO: 1113) |
| 4F11V1-39 | DIQMTQSPSSLSASVGDRVTITCRSSQTIIHSNGNTYLEWYQQKPGKA |
| | PKWYKVSNRFSGVPSRFSGSGSGTDFTLTISSLQPEDFATYYCFQGS |
| | HVPYTFGQGTKVEIK (SEQ ID NO: 1114) |
| 4F11V1-9 | DIQLTQSPSFLSASVGDRVTITCRSSQTIIHSNGNTYLEWYQQKPGKA |
| | PKWYKVSNRFSGVPSRFSGSGSGTEFTLTISSLQPEDFATYYCFQGS |
| | HVPYTFGQGTKVEIK (SEQ ID NO: 1112) |
| 4F11V1-5 | DIQMTQSPSTLSASVGDRVTITCRSSQTIIHSNGNTYLEWYQQKPGKA |
| | PKWYKVSNRFSGVPSRFSGSGSGTEFTLTISSLQPDDFATYYCFQGS |
| | HVPYTFGQGTKVEIK (SEQ ID NO: 1116) |
| 4F11V3-20 | EIVLTQSPGTLSLSPGERATLSCRSSQTIIHSNGNTYLEWYQQKPGQAP |
| | RLLIYKVSNRFSGIPDRFSGSGSGTDFTLTISRLEPEDFAVYYCFQGSH |
| | VPYTFGQGTKVEIK (SEQ ID NO: 1117) |

Antibody 6H6

| | |
|---|---|
| 6H6V4-1 | DIVMTQSPDSLAVSLGERATINCKSSQSVFYSSNQKNYLAWYQQKPG |
| | QPPKLLIYWASTRESGVPDRFSGSGSGTDFTLTISSLQAEDVAVYYCH |
| | QYLSSLTFGQGTKVEIK (SEQ ID NO: 1500) |
| 6H6V2-28 | DIVMTQSPLSLPVTPGEPASISCKSSQSVFYSSNQKNYLAWYLQKPGQ |
| | SPQLLIYWASTRESGVPDRFSGSGSGTDFTLKISRVEAEDVGVYYCHQ |
| | YLSSLTFGQGTKVEIK (SEQ ID NO: 1501) |
| 6H6V2-30 | DVVMTQSPLSLPVTLGQPASISCKSSQSVFYSSNQKNYLAWFQQRPG |
| | QSPRRLIYWASTRESGVPDRFSGSGSGTDFTLKISRVEAEDVGVYYCH |
| | QYLSSLTFGQGTKVEIK (SEQ ID NO: 1502) |
| 6H6V1-5 | DIQMTQSPSTLSASVGDRVTITCKSSQSVFYSSNQKNYLAWYQQKPG |
| | KAPKLLIYWASTRESGVPSRFSGSGSGTEFTLTISSLQPDDFATYYCH |
| | QYLSSLTFGQGTKVEIK (SEQ ID NO: 1503) |
| 6H6V1-9 | DIQLTQSPSFLSASVGDRVTITCKSSQSVFYSSNQKNYLAWYQQKPG |
| | KAPKLLIYWASTRESGVPSRFSGSGSGTEFTLTISSLQPEDFATYYCHQ |
| | YLSSLTFGQGTKVEIK (SEQ ID NO: 1504) |
| 6H6V3-15 | EIVMTQSPATLSVSPGERATLSCKSSQSVFYSSNQKNYLAWYQQKPG |
| | QAPRLLIYWASTRESGIPARFSGSGSGTEFTLTISSLQSEDFAVYYCHQ |
| | YLSSLTFGQGTKVEIK (SEQ ID NO: 1505) |
| 6H6V1-33 | DIQMTQSPSSLSASVGDRVTITCKSSQSVFYSSNQKNYLAWYQQKPG |
| | KAPKLLIYWASTRESGVPSRFSGSGSGTDFTFTISSLQPEDIATYYCHQ |
| | YLSSLTFGQGTKVEIK (SEQ ID NO: 1506) |
| 6H6V3-11 | EIVLTQSPATLSLSPGERATLSCKSSQSVFYSSNQKNYLAWYQQKPG |
| | QAPRLLIYWASTRESGIPARFSGSGSGTDFTLTISSLEPEDFAVYYCHQ |
| | YLSSLTFGQGTKVEIK (SEQ ID NO: 1507) |
| 6H6V1-39 | DIQMTQSPSSLSASVGDRVTITCKSSQSVFYSSNQKNYLAWYQQKPG |
| | KAPKLLIYWASTRESGVPSRFSGSGSGTDFTLTISSLQPEDFATYYCHQ |
| | YLSSLTFGQGTKVEIK (SEQ ID NO: 1508) |
| 6H6V3-20 | EIVLTQSPGTLSLSPGERATLSCKSSQSVFYSSNQKNYLAWYQQKPG |
| | QAPRLLIYWASTRESGIPDRFSGSGSGTDFTLTISRLEPEDFAVYYCHQ |
| | YLSSLTFGQGTKVEIK (SEQ ID NO: 1509) |

Antibody 7A9

| | |
|---|---|
| 7A9V1-9 | DIQLTQSPSFLSASVGDRVTITCRASENIYSYLAWYQQKPGKAPKLLI |
| | YKAKTLAEGVPSRFSGSGSGTEFTLTISSLQPEDFATYYCQHHYGTPF |
| | TFGQGTKVEIK (SEQ ID NO: 1132) |
| 7A9V3-11 | EIVLTQSPATLSLSPGERATLSCRASENIYSYLAWYQQKPGQAPRLLI |
| | YKAKTLAEGIPARFSGSGSGTDFTLTISSLEPEDFAVYYCQHHYGTPF |
| | TFGQGTKVEIK (SEQ ID NO: 1133) |
| 7A9V1-5 | DIQMTQSPSTLSASVGDRVTITCRASENIYSYLAWYQQKPGKAPKLL |
| | IYKAKTLAEGVPSRFSGSGSGTEFTLTISSLQPDDFATYYCQHHYGTP |
| | FTFGQGTKVEIK (SEQ ID NO: 1134) |
| 7A9V3-15 | EIVMTQSPATLSVSPGERATLSCRASENIYSYLAWYQQKPGQAPRLLI |
| | YKAKTLAEGIPARFSGSGSGTEFTLTISSLQSEDFAVYYCQHHYGTPF |
| | TFGQGTKVEIK (SEQ ID NO: 1135) |
| 7A9V1-39 | DIQMTQSPSSLSASVGDRVTITCRASENIYSYLAWYQQKPGKAPKLLI |
| | YKAKTLAEGVPSRFSGSGSGTDFTLTISSLQPEDFATYYCQHHYGTPF |
| | TFGQGTKVEIK (SEQ ID NO: 1136) |
| 7A9V1-33 | DIQMTQSPSSLSASVGDRVTITCRASENIYSYLAWYQQKPGKAPKLLI |
| | YKAKTLAEGVPSRFSGSGSGTDFTFTISSLQPEDIATYYCQHHYGTPFT |
| | FGQGTKVEIK (SEQ ID NO: 1137) |
| 7A9V3-20 | EIVLTQSPGTLSLSPGERATLSCRASENIYSYLAWYQQKPGQAPRLLI |
| | YKAKTLAEGIPDRFSGSGSGTDFTLTISRLEPEDFAVYYCQHHYGTPF |
| | TFGQGTKVEIK (SEQ ID NO: 1138) |
| 7A9V2-28 | DIVMTQSPLSLPVTPGEPASISCRASENIYSYLAWYLQKPGQSPQLLIY |
| | KAKTLAEGVPDRFSGSGSGTDFTLKISRVEAEDVGVYYCQHHYGTPF |
| | TFGQGTKVEIK (SEQ ID NO: 1139) |
| 7A9V4-1 | DIVMTQSPDSLAVSLGERATINCRASENIYSYLAWYQQKPGQPPKLL |
| | IYKAKTLAEGVPDRFSGSGSGTDFTLTISSLQAEDVAVYYCQHHYGT |
| | PFTFGQGTKVEIK (SEQ ID NO: 1140) |
| 7A9V2-30 | DVVMTQSPLSLPVTLGQPASISCRASENIYSYLAWFQQRPGQSPRRLI |
| | YKAKTLAEGVPDRFSGSGSGTDFTLKISRVEAEDVGVYYCQHHYGT |
| | PFTFGQGTKVEIK (SEQ ID NO: 1141) |

Antibody 8A1

| | |
|---|---|
| 8A1V3-15 | EIVMTQ SPATLSVSPGERATLSCRTSENVYSNLAWYQQKPGQAPRLL |
| | IYAATNLADGIPARFSGSGSGTEFTLTISSLQSEDFAVYYCHHFWGTP |
| | YTFGQGTKVEIK (SEQ ID NO: 1143) |
| 8A1V3-11 | EIVLTQ SPATLSLSPGERATLSCRTSENVYSNLAWYQQKPGQAPRLLI |
| | YAATNLADGIPARFSGSGSGTDFTLTISSLEPEDFAVYYCHHFWGTPY |
| | TFGQGTKVEIK (SEQ ID NO: 1144) |
| 8A1V1-9 | DIQLTQSPSFLSASVGDRVTITCRTSENVYSNLAWYQQKPGKAPKLLI |
| | YAATNLADGVPSRFSGSGSGTEFTLTISSLQPEDFATYYCHHFWGTPY |
| | TFGQGTKVEIK (SEQ ID NO: 1145) |
| 8A1V1-5 | DIQMTQSPSTLSASVGDRVTITCRTSENVYSNLAWYQQKPGKAPKLL |
| | IYAATNLADGVPSRFSGSGSGTEFTLTISSLQPDDFATYYCHHFWGTP |
| | YTFGQGTKVEIK (SEQ ID NO: 1146) |
| 8A1V1-39 | DIQMTQSPSSLSASVGDRVTITCRTSENVYSNLAWYQQKPGKAPKLL |
| | IYAATNLADGVPSRFSGSGSGTDFTLTISSLQPEDFATYYCHHFWGTP |
| | YTFGQGTKVEIK (SEQ ID NO: 1147) |
| 8A1V1-33 | DIQMTQSPSSLSASVGDRVTITCRTSENVYSNLAWYQQKPGKAPKLL |
| | IYAATNLADGVPSRFSGSGSGTDFTFTISSLQPEDIATYYCHHFWGTP |
| | YTFGQGTKVEIK (SEQ ID NO: 1148) |
| 8A1V3-20 | EIVLTQSPGTLSLSPGERATLSCRTSENVYSNLAWYQQKPGQAPRLLI |
| | YAATNLADGIPDRFSGSGSGTDFTLTISRLEPEDFAVYYCHHFWGTPY |
| | TFGQGTKVEIK (SEQ ID NO: 1149) |
| 8A1V2-28 | DIVMTQSPLSLPVTPGEPASISCRTSENVYSNLAWYLQKPGQSPQLLIY |
| | AATNLADGVPDRFSGSGSGTDFTLKISRVEAEDVGVYYCHHFWGTP |
| | YTFGQGTKVEIK (SEQ ID NO: 1150) |
| 8A1V2-30 | DVVMTQSPLSLPVTLGQPASISCRTSENVYSNLAWFQQRPGQSPRRLI |
| | YAATNLADGVPDRFSGSGSGTDFTLKISRVEAEDVGVYYCHHFWGTP |
| | YTFGQGTKVEIK (SEQ ID NO: 1151) |
| 8A1V4-1 | DIVMTQSPDSLAVSLGERATINCRTSENVYSNLAWYQQKPGQPPKLL |
| | IYAATNLADGVPDRFSGSGSGTDFTLTISSLQAEDVAVYYCHHFWGT |
| | PYTFGQGTKVEIK (SEQ ID NO: 1152) |

Antibody 9F5

| | |
|---|---|
| 9F5V2-30 | DVVMTQSPLSLPVTLGQPASISCRSSQSLVHSNGYTYLHWFQQRPGQ |
| | SPRRLIYKVSNRFSGVPDRFSGSGSGTDFTLKISRVEAEDVGVYYCSQ |
| | STRVPYTFGQGTKVEIK (SEQ ID NO: 1154) |
| 9F5V2-28 | DIVMTQSPLSLPVTPGEPASISCRSSQSLVHSNGYTYLHWYLQKPGQ |
| | SPQLLIYKVSNRFSGVPDRFSGSGSGTDFTLKISRVEAEDVGVYYCSQ |
| | STRVPYTFGQGTKVEIK (SEQ ID NO: 1155) |
| 9F5V4-1 | DIVMTQSPDSLAVSLGERATINCRSSQSLVHSNGYTYLHWYQQKPGQ |
| | PPKWYKVSNRFSGVPDRFSGSGSGTDFTLTISSLQAEDVAVYYCSQS |
| | TRVPYTFGQGTKVEIK (SEQ ID NO: 1156) |
| 9F5V3-11 | EIVLTQSPATLSLSPGERATLSCRSSQSLVHSNGYTYLHWYQQKPGQ |
| | APRLLIYKVSNRFSGIPARFSGSGSGTDFTLTISSLEPEDFAVYYCSQST |
| | RVPYTFGQGTKVEIK (SEQ ID NO: 1157) |
| 9F5V1-33 | DIQMTQSPSSLSASVGDRVTITCRSSQSLVHSNGYTYLHWYQQKPGK |
| | APKLLIYKVSNRFSGVPSRFSGSGSGTDFTFTISSLQPEDIATYYCSQST |
| | RVPYTFGQGTKVEIK (SEQ ID NO: 1158) |
| 9F5V3-15 | EIVMTQSPATLSVSPGERATLSCRSSQSLVHSNGYTYLHWYQQKPGQ |
| | APRLLIYKVSNRFSGIPARFSGSGSGTEFTLTISSLQSEDFAVYYCSQST |
| | RVPYTFGQGTKVEIK (SEQ ID NO: 1159) |
| 9F5V1-5 | DIQMTQSPSTLSASVGDRVTITCRSSQSLVHSNGYTYLHWYQQKPG |
| | KAPKWYKVSNRFSGVPSRFSGSGSGTEFTLTISSLQPDDFATYYCSQ |
| | STRVPYTFGQGTKVEIK (SEQ ID NO: 1160) |
| 9F5V1-39 | DIQMTQSPSSLSASVGDRVTITCRSSQSLVHSNGYTYLHWYQQKPGK |
| | APKWYKVSNRFSGVPSRFSGSGSGTDFTLTISSLQPEDFATYYCSQS |
| | TRVPYTFGQGTKVEIK (SEQ ID NO: 1161) |
| 9F5V1-9 | DIQLTQSPSFLSASVGDRVTITCRSSQSLVHSNGYTYLHWYQQKPGKA |
| | PKWYKVSNRFSGVPSRFSGSGSGTEFTLTISSLQPEDFATYYCSQSTR |
| | VPYTFGQGTKVEIK (SEQ ID NO: 1162) |
| 9F5V3-20 | EIVLTQSPGTLSLSPGERATLSCRSSQSLVHSNGYTYLHWYQQKPGQ |
| | APRLLIYKVSNRFSGIPDRFSGSGSGTDFTLTISRLEPEDFAVYYCSQST |
| | RVPYTFGQGTKVEIK (SEQ ID NO: 1163) |
| 9F5-L1 | DIVMTQTPLSLSVTPGQPASISCRSSQSLVHSNGYTYLHWYLQKPGQ |
| | SPQLLIYKVSNRFSGVPDRFSGSGSGTDFTLKISRVEAEDVGVYYCSQ |
| | STRVPYTFGQGTKLEIK (SEQ ID NO: 1663) |
| 9F5-L2 | DVVMTQTPLSLSVTPGQPASISCRSSQSLVHSNGYTYLHWYLQKPGQ |
| | SPQLLIYKVSNRFSGVPDRFSGSGSGTDFTLKISRVEAEDVGVYYCSQ |
| | STRVPYTFGQGTKLEIK (SEQ ID NO: 1664) |

Antibody 9G1

| | |
|---|---|
| 9G1V2-30 | DVVMTQSPLSLPVTLGQPASISCRFSQSLVHSNGNTYLHWFQQRPGQ |
| | SPRRLIYKVSNRFSGVPDRFSGSGSGTDFTLKISRVEAEDVGVYYCSQ |
| | STRVPPTFGQGTKVEIK (SEQ ID NO: 1165) |
| 9G1V2-28 | DIVMTQSPLSLPVTPGEPASISCRFSQSLVHSNGNTYLHWYLQKPGQSPQ |
| | LLIYKVSNRFSGVPDRFSGSGSGTDFTLKISRVEAEDVGVYYCSQSTRVP |
| | PTFGQGTKVEIK (SEQ ID NO: 1166) |
| 9G1V4-1 | DIVMTQSPDSLAVSLGERATINCRFSQSLVHSNGNTYLHWYQQKPGQ |
| | PPKWYKVSNRFSGVPDRFSGSGSGTDFTLTISSLQAEDVAVYYCSQS |
| | TRVPPTFGQGTKVEIK (SEQ ID NO: 1167) |
| 9G1V3 -11 | EIVLTQSPATLSLSPGERATLSCRFSQSLVHSNGNTYLHWYQQKPGQ |
| | APRLLIYKVSNRFSGIPARFSGSGSGTDFTLTISSLEPEDFAVYYCSQST |
| | RVPPTFGQGTKVEIK (SEQ ID NO: 1168) |
| 9G1V3-15 | EIVMTQSPATLSVSPGERATLSCRFSQSLVHSNGNTYLHWYQQKPGQ |
| | APRLLIYKVSNRFSGIPARFSGSGSGTEFTLTISSLQSEDFAVYYCSQS |
| | TRVPPTFGQGTKVEIK (SEQ ID NO: 1169) |
| 9G1V1-9 | DIQLTQSPSFLSASVGDRVTITCRFSQSLVHSNGNTYLHWYQQKPGK |
| | APKWYKVSNRFSGVPSRFSGSGSGTEFTLTISSLQPEDFATYYCSQST |
| | RVPPTFGQGTKVEIK (SEQ ID NO: 1170) |
| 9G1V1-5 | DIQMTQSPSTLSASVGDRVTITCRFSQSLVHSNGNTYLHWYQQKPGK |
| | APKWYKVSNRFSGVPSRFSGSGSGTEFTLTISSLQPDDFATYYCSQST |
| | RVPPTFGQGTKVEIK (SEQ ID NO: 1171) |
| 9G1V1-39 | DIQMTQSPSSLSASVGDRVTITCRFSQSLVHSNGNTYLHWYQQKPGKAP |
| | KLLIYKVSNRFSGVPSRFSGSGSGTDFTLTISSLQPEDFATYYCSQSTRVPP |
| | TFGQGTKVEIK (SEQ ID NO: 1172) |
| 9G1V1-33 | DIQMTQSPSSLSASVGDRVTITCRFSQSLVHSNGNTYLHWYQQKPGK |
| | APKWYKVSNRFSGVPSRFSGSGSGTDFTFTISSLQPEDIATYYCSQST |
| | RVPPTFGQGTKVEIK (SEQ ID NO: 1173) |
| 9G1V3 -20 | EIVLTQSPGTLSLSPGERATLSCRFSQSLVHSNGNTYLHWYQQKPGQ |
| | APRLLIYKVSNRFSGIPDRFSGSGSGTDFTLTISRLEPEDFAVYYCSQS |
| | TRVPPTFGQGTKVEIK (SEQ ID NO: 1174) |

Antibody 9G3

| | |
|---|---|
| 9G3V1-33 | DIQMTQSPSSLSASVGDRVTITCKASSNVNYMSWYQQKPGKAPKLLIY |
| | FTSNLPSGVPSRFSGSGSGTDFTFTISSLQPEDIATYYCSGEVTQFTFGQG |
| | TKVEIK (SEQ ID NO: 1176) |
| 9G3V1-9 | DIQLTQSPSFLSASVGDRVTITCKASSNVNYMSWYQQKPGKAPKLLIY |
| | FTSNLPSGVPSRFSGSGSGTEFTLTISSLQPEDFATYYCSGEVTQFTFGQ |
| | GTKVEIK (SEQ ID NO: 1177) |
| 9G3V1-39 | DIQMTQSPSSLSASVGDRVTITCKASSNVNYMSWYQQKPGKAPKLLIY |
| | FTSNLPSGVPSRFSGSGSGTDFTLTISSLQPEDFATYYCSGEVTQFTFGQ |
| | GTKVEIK (SEQ ID NO: 1178) |
| 9G3V3-11 | EIVLTQSPATLSLSPGERATLSCKASSNVNYMSWYQQKPGQAPRLLIYF |
| | TSNLPSGIPARFSGSGSGTDFTLTISSLEPEDFAVYYCSGEVTQFTFGQG |
| | TKVEIK (SEQ ID NO: 1641) |
| 9G3V1-5 | DIQMTQSPSTLSASVGDRVTITCKASSNVNYMSWYQQKPGKAPKLLIYF |
| | TSNLPSGVPSRFSGSGSGTEFTLTISSLQPDDFATYYCSGEVTQFTFGQGT |
| | KVEIK (SEQ ID NO: 1179) |
| 9G3V3-15 | EIVMTQSPATLSVSPGERATLSCKASSNVNYMSWYQQKPGQAPRLLIY |
| | FTSNLPSGIPARFSGSGSGTEFTLTISSLQSEDFAVYYCSGEVTQFTFGQG |
| | TKVEIK (SEQ ID NO: 1180) |
| 9G3V3-20 | EIVLTQSPGTLSLSPGERATLSCKASSNVNYMSWYQQKPGQAPRLLIYF |
| | TSNLPSGIPDRFSGSGSGTDFTLTISRLEPEDFAVYYCSGEVTQFTFGQG |
| | TKVEIK (SEQ ID NO: 1181) |
| 9G3V2-28 | DIVMTQSPLSLPVTPGEPASISCKASSNVNYMSWYLQKPGQSPQLLIY |
| | FTSNLPSGVPDRFSGSGSGTDFTLKISRVEAEDVGVYYCSGEVTQFTF |
| | GQGTKVEIK (SEQ ID NO: 1182) |
| 9G3V2-30 | DVVMTQSPLSLPVTLGQPASISCKASSNVNYMSWFQQRPGQSPRRLIYF |
| | TSNLPSGVPDRFSGSGSGTDFTLKISRVEAEDVGVYYCSGEVTQFTFGQ |
| | GTKVEIK (SEQ ID NO: 1183) |
| 9G3V4-1 | DIVMTQSPDSLAVSLGERATTNCKASSNVNYMSWYQQKPGQPPKLLI |
| | YFTSNLPSGVPDRFSGSGSGTDFTLTISSLQAEDVAVYYCSGEVTQFTF |
| | GQGTKVEIK (SEQ ID NO: 1184) |

Antibody10A9

| | |
|---|---|
| 10A9V2-30 | DVVMTQSPLSLPVTLGQPASISCRSSQTIIHSNGNTYLEWFQQRPGQSPRR |
| | LIYKVSNRFCGVPDRFSGSGSGTDFTLKISRVEAEDVGVYYCFQGSHVPY |
| | TFGQGTKVEIK (SEQ ID NO: 1186) |
| 10A9V2-28 | DIVMTQSPLSLPVTPGEPASISCRSSQTIIHSNGNTYLEWYLQKPGQSP |
| | QLLIYKVSNRFCGVPDRFSGSGSGTDFTLKISRVEAEDVGVYYCFQG |
| | SHVPYTFGQGTKVEIK (SEQ ID NO: 1187) |
| 10A9V4-1 | DIVMTQSPDSLAVSLGERATINCRSSQTIIHSNGNTYLEWYQQKPGQP |
| | PKWYKVSNRFCGVPDRFSGSGSGTDFTLTISSLQAEDVAVYYCFQG |
| | SHVPYTFGQGTKVEIK (SEQ ID NO: 1188) |
| 10A9V3-11 | EIVLTQSPATLSLSPGERATLSCRSSQTIIHSNGNTYLEWYQQKPGQAP |
| | RLLIYKVSNRFCGIPARFSGSGSGTDFTLTISSLEPEDFAVYYCFQGSH |
| | VPYTFGQGTKVEIK (SEQ ID NO: 1189) |
| 10A9V3-15 | EIVMTQSPATLSVSPGERATLSCRSSQTIIHSNGNTYLEWYQQKPGQ |
| | APRLLIYKVSNRFCGIPARFSGSGSGTEFTLTISSLQSEDFAVYYCFQG |
| | SHVPYTFGQGTKVEIK (SEQ ID NO: 1190) |
| 10A9V1-33 | DIQMTQSPSSLSASVGDRVTITCRSSQTIIHSNGNTYLEWYQQKPG |
| | KAPKWYKVSNRFCGVPSRFSGSGSGTDFTFTISSLQPEDIATYYCF |
| | QGSHVPYTFGQGTKVEIK (SEQ ID NO: 1191) |
| 10A9V3-20 | EIVLTQSPGTLSLSPGERATLSCRSSQTIIHSNGNTYLEWYQQKPGQAP |
| | RLLIYKVSNRFCGIPDRFSGSGSGTDFTLTISRLEPEDFAVYYCFQGSH |
| | VPYTFGQGTKVEIK (SEQ ID NO: 1192) |
| 10A9V1-9 | DIQLTQSPSFLSASVGDRVTITCRSSQTIIHSNGNTYLEWYQQKPGKA |
| | PKWYKVSNRFCGVPSRFSGSGSGTEFTLTISSLQPEDFATYYCFQGS |
| | HVPYTFGQGTKVEIK (SEQ ID NO: 1193) |
| 10A9V1-5 | DIQMTQSPSTLSASVGDRVTITCRSSQTIIHSNGNTYLEWYQQKPGKA |
| | PKWYKVSNRFCGVPSRFSGSGSGTEFTLTISSLQPDDFATYYCFQGS |
| | HVPYTFGQGTKVEIK (SEQ ID NO: 1194) |
| 10A9V1-39 | DIQMTQSPSSLSASVGDRVTITCRSSQTIIHSNGNTYLEWYQQKPGKA |
| | PKWYKVSNRFCGVPSRFSGSGSGTDFTLTISSLQPEDFATYYCFQGS |
| | HVPYTFGQGTKVEIK (SEQ ID NO: 1195) |

Antibody11A8

| | |
|---|---|
| 11A8V4-1 | DIVMTQSPDSLAVSLGERATINCKSSQSLLNSGNQKKYLTWYQQKPG |
| | QPPKLLIYWASTRESGVPDRFSGSGSGTDFTLTISSLQAEDVAVYYCQ |
| | NDYGFPLTFGQGTKVEIK (SEQ ID NO: 1197) |
| 11A8V2-30 | DVVMTQSPLSLPVTLGQPASISCKSSQSLLNSGNQKKYLTWFQQRPG |
| | QSPRRLIYWASTRESGVPDRFSGSGSGTDFTLKISRVEAEDVGVYYCQ |
| | NDYGFPLTFGQGTKVEIK (SEQ ID NO: 1198) |
| 11A8V2-28 | DIVMTQSPLSLPVTPGEPASISCKSSQSLLNSGNQKKYLTWYLQKPG |
| | QSPQLLIYWASTRESGVPDRFSGSGSGTDFTLKISRVEAEDVGVYYC |
| | QNDYGFPLTFGQGTKVEIK (SEQ ID NO: 1199) |
| 11A8V1-33 | DIQMTQSPSSLSASVGDRVTITCKSSQSLLNSGNQKKYLTWYQQKPG |
| | KAPKLLIYWASTRESGVPSRFSGSGSGTDFTFTISSLQPEDIATYYCQN |
| | DYGFPLTFGQGTKVEIK (SEQ ID NO: 1200) |
| 11A8V3-11 | EIVLTQSPATLSLSPGERATLSCKSSQSLLNSGNQKKYLTWYQQKPG |
| | QAPRLLIYWASTRESGIPARFSGSGSGTDFTLTISSLEPEDFAVYYCQN |
| | DYGFPLTFGQGTKVEIK (SEQ ID NO: 1201) |
| 11A8V3-15 | EIVMTQSPATLSVSPGERATLSCKSSQSLLNSGNQKKYLTWYQQKPG |
| | QAPRLLIYWASTRESGIPARFSGSGSGTEFTLTISSLQSEDFAVYYCQN |
| | DYGFPLTFGQGTKVEIK (SEQ ID NO: 1202) |
| 11A8V1-5 | DIQMTQSPSTLSASVGDRVTITCKSSQSLLNSGNQKKYLTWYQQKPG |
| | KAPKLLIYWASTRESGVPSRFSGSGSGTEFTLTISSLQPDDFATYYCQ |
| | NDYGFPLTFGQGTKVEIK (SEQ ID NO: 1203) |
| 11A8V3-20 | EIVLTQSPGTLSLSPGERATLSCKSSQSLLNSGNQKKYLTWYQQKPG |
| | QAPRLLIYWASTRESGIPDRFSGSGSGTDFTLTISRLEPEDFAVYYCQN |
| | DYGFPLTFGQGTKVEIK (SEQ ID NO: 1204) |
| 11A8V1-9 | DIQLTQSPSFLSASVGDRVTITCKSSQSLLNSGNQKKYLTWYQQKPG |
| | KAPKLLIYWASTRESGVPSRFSGSGSGTEFTLTISSLQPEDFATYYCQ |
| | NDYGFPLTFGQGTKVEIK (SEQ ID NO: 1205) |
| 11A8V1-39 | DIQMTQSPSSLSASVGDRVTITCKSSQSLLNSGNQKKYLTWYQQKPG |
| | KAPKLLIYWASTRESGVPSRFSGSGSGTDFTLTISSLQPEDFATYYCQ |
| | NDYGFPLTFGQGTKVEIK (SEQ ID NO: 1206) |

Antibody12D9

| | |
|---|---|
| 12D9V4-1 | DIVMTQSPDSLAVSLGERATINCKSSQSLLYSGNQKNFLAWYQQKPG |
| | QPPKLLIYWASTRESGVPDRFSGSGSGTDFTLTISSLQAEDVAVYYCQ |
| | QYYSYPFTFGQGTKVEIK (SEQ ID NO: 1208) |
| 12D9V2-28 | DIVMTQSPLSLPVTPGEPASISCKSSQSLLYSGNQKNFLAWYLQKPGQ |
| | SPQLLIYWASTRESGVPDRFSGSGSGTDFTLKISRVEAEDVGVYYCQQ |
| | YYSYPFTFGQGTKVEIK (SEQ ID NO: 1209) |
| 12D9V2-30 | DVVMTQSPLSLPVTLGQPASISCKSSQSLLYSGNQKNFLAWFQQRPG |
| | QSPRRLIYWASTRESGVPDRFSGSGSGTDFTLKISRVEAEDVGVYYCQ |
| | QYYSYPFTFGQGTKVEIK (SEQ ID NO: 1210) |
| 12D 9V1-9 | DIQLTQSPSFLSASVGDRVTITCKSSQSLLYSGNQKNFLAWYQQKPG |
| | KAPKLLIYWASTRESGVPSRFSGSGSGTEFTLTISSLQPEDFATYYCQQ |
| | YYSYPFTFGQGTKVEIK (SEQ ID NO: 1211) |
| 12D9V1-5 | DIQMTQSPSTLSASVGDRVTITCKSSQSLLYSGNQKNFLAWYQQKPG |
| | KAPKLLIYWASTRESGVPSRFSGSGSGTEFTLTISSLQPDDFATYYCQ |
| | QYYSYPFTFGQGTKVEIK (SEQ ID NO: 1212) |
| 12D9V3-15 | EIVMTQSPATLSVSPGERATLSCKSSQSLLYSGNQKNFLAWYQQKPG |
| | QAPRLLIYWASTRESGIPARFSGSGSGTEFTLTISSLQSEDFAVYYCQQ |
| | YYSYPFTFGQGTKVEIK (SEQ ID NO: 1213) |
| 12D9V1-33 | DIQMTQSPSSLSASVGDRVTITCKSSQSLLYSGNQKNFLAWYQQKPG |
| | KAPKLLIYWASTRESGVPSRFSGSGSGTDFTFTISSLQPEDIATYYCQQ |
| | YYSYPFTFGQGTKVEIK (SEQ ID NO: 1214) |
| 12D9V3-11 | EIVLTQSPATLSLSPGERATLSCKSSQSLLYSGNQKNFLAWYQQKPG |
| | QAPRLLIYWASTRESGIPARFSGSGSGTDFTLTISSLEPEDFAVYYCQQ |
| | YYSYPFTFGQGTKVEIK (SEQ ID NO: 1215) |
| 12D9V1-39 | DIQMTQSPSSLSASVGDRVTITCKSSQSLLYSGNQKNFLAWYQQKPG |
| | KAPKLLIYWASTRESGVPSRFSGSGSGTDFTLTISSLQPEDFATYYCQ |
| | QYYSYPFTFGQGTKVEIK (SEQ ID NO: 1216) |
| 12D9V3-20 | EIVLTQSPGTLSLSPGERATLSCKSSQSLLYSGNQKNFLAWYQQKPG |
| | QAPRLLIYWASTRESGIPDRFSGSGSGTDFTLTISRLEPEDFAVYYCQQ |
| | YYSYPFTFGQGTKVEIK (SEQ ID NO: 1217) |

Antibody12F9

| | |
|---|---|
| 12F9V4-1 | DIVMTQSPDSLAVSLGERATINCKSSQSLLYSSDQKNYLAWYQQKPG |
| | QPPKLLIYWASTRESGVPDRFSGSGSGTDFTLTISSLQAEDVAVYYCQ |
| | QYYSYPLTFGQGTKVEIK (SEQ ID NO: 1120) |
| 12F9V2-28 | DIVMTQSPLSLPVTPGEPASISCKSSQSLLYSSDQKNYLAWYLQKPG |
| | QSPQLLIYWASTRESGVPDRFSGSGSGTDFTLKISRVEAEDVGVYYC |
| | QQYYSYPLTFGQGTKVEIK (SEQ ID NO: 1121) |
| 12F9V2-30 | DVVMTQSPLSLPVTLGQPASISCKSSQSLLYSSDQKNYLAWFQQRPG |
| | QSPRRLIYWASTRESGVPDRFSGSGSGTDFTLKISRVEAEDVGVYYC |
| | QQYYSYPLTFGQGTKVEIK (SEQ ID NO: 1122) |
| 12F9V3-15 | EIVMTQSPATLSVSPGERATLSCKSSQSLLYSSDQKNYLAWYQQKPG |
| | QAPRLLIYWASTRESGIPARFSGSGSGTEFTLTISSLQSEDFAVYYCQQ |
| | YYSYPLTFGQGTKVEIK (SEQ ID NO: 1125) |
| 12F9V1-5 | DIQMTQSPSTLSASVGDRVTITCKSSQSLLYSSDQKNYLAWYQQKPG |
| | KAPKLLIYWASTRESGVPSRFSGSGSGTEFTLTISSLQPDDFATYYCQ |
| | QYYSYPLTFGQGTKVEIK (SEQ ID NO: 1123) |
| 12F9V1-9 | DIQLTQSPSFLSASVGDRVTITCKSSQSLLYSSDQKNYLAWYQQKPG |
| | KAPKLLIYWASTRESGVPSRFSGSGSGTEFTLTISSLQPEDFATYYCQ |
| | QYYSYPLTFGQGTKVEIK (SEQ ID NO: 1124) |
| 12F9V1-33 | DIQMTQSPSSLSASVGDRVTITCKSSQSLLYSSDQKNYLAWYQQKPG |
| | KAPKLLIYWASTRESGVPSRFSGSGSGTDFTFTISSLQPEDIATYYCQQ |
| | YYSYPLTFGQGTKVEIK (SEQ ID NO: 1128) |
| 12F9V3-11 | EIVLTQSPATLSLSPGERATLSCKSSQSLLYSSDQKNYLAWYQQKPG |
| | QAPRLLIYWASTRESGIPARFSGSGSGTDFTLTISSLEPEDFAVYYCQQ |
| | YYSYPLTFGQGTKVEIK (SEQ ID NO: 1127) |
| 12F9V1-39 | DIQMTQSPSSLSASVGDRVTITCKSSQSLLYSSDQKNYLAWYQQKPG |
| | KAPKLLIYWASTRESGVPSRFSGSGSGTDFTLTISSLQPEDFATYYCQQ |
| | YYSYPLTFGQGTKVEIK (SEQ ID NO: 1126) |
| 12F9V3-20 | EIVLTQSPGTLSLSPGERATLSCKSSQSLLYSSDQKNYLAWYQQKPG |
| | QAPRLLIYWASTRESGIPDRFSGSGSGTDFTLTISRLEPEDFAVYYCQQ |
| | YYSYPLTFGQGTKVEIK (SEQ ID NO: 1129) |

Antibodyl0C1

| | |
|---|---|
| 10C1V4-1 | DIVMTQSPDSLAVSLGERATINCKSSQSVFYSSNQKNYLAWYQQKPG |
| | QPPKLLIYWASTRESGVPDRFSGSGSGTDFTLTISSLQAEDVAVYYCH |
| | QYLSSLTFGQGTKVEIK (SEQ ID NO: 1423) |
| 10C1V2-30 | DVVMTQSPLSLPVTLGQPASISCKSSQSVFYSSNQKNYLAWFQQRPG |
| | QSPRRLIYWASTRESGVPDRFSGSGSGTDFTLKISRVEAEDVGVYYCH |
| | QYLSSLTFGQGTKVEIK (SEQ ID NO: 1424) |
| 10C1V2-28 | DIVMTQSPLSLPVTPGEPASISCKSSQSVFYSSNQKNYLAWYLQKPGQ |
| | SPQLLIYWASTRESGVPDRFSGSGSGTDFTLKISRVEAEDVGVYYCH |
| | QYLSSLTFGQGTKVEIK (SEQ ID NO: 1425) |
| 10C1V1-5 | DIQMTQSPSTLSASVGDRVTITCKSSQSVFYSSNQKNYLAWYQQKPG |
| | KAPKLLIYWASTRESGVPSRFSGSGSGTEFTLTISSLQPDDFATYYCHQ |
| | YLSSLTFGQGTKVEIK (SEQ ID NO: 1426) |
| 10C1V3-15 | EIVMTQSPATLSVSPGERATLSCKSSQSVFYSSNQKNYLAWYQQKPG |
| | QAPRLLIYWASTRESGIPARFSGSGSGTEFTLTISSLQSEDFAVYYCHQ |
| | YLSSLTFGQGTKVEIK (SEQ ID NO: 1427) |
| 10C1V1-9 | DIQLTQSPSFLSASVGDRVTITCKSSQSVFYSSNQKNYLAWYQQKPG |
| | KAPKLLIYWASTRESGVPSRFSGSGSGTEFTLTISSLQPEDFATYYCH |
| | QYLSSLTFGQGTKVEIK (SEQ ID NO: 1428) |
| 10C1V3-11 | EIVLTQSPATLSLSPGERATLSCKSSQSVFYSSNQKNYLAWYQQKPG |
| | QAPRLLIYWASTRESGIPARFSGSGSGTDFTLTISSLEPEDFAVYYCHQ |
| | YLSSLTFGQGTKVEIK (SEQ ID NO: 1429) |
| 10C1V1-39 | DIQMTQSPSSLSASVGDRVTITCKSSQSVFYSSNQKNYLAWYQQKPG |
| | KAPKLLIYWASTRESGVPSRFSGSGSGTDFTLTISSLQPEDFATYYCHQ |
| | YLSSLTFGQGTKVEIK (SEQ ID NO: 1430) |
| 10C1V1-33 | DIQMTQSPSSLSASVGDRVTITCKSSQSVFYSSNQKNYLAWYQQKPG |
| | KAPKLLIYWASTRESGVPSRFSGSGSGTDFTFTISSLQPEDIATYYCHQ |
| | YLSSLTFGQGTKVEIK (SEQ ID NO: 1431) |
| 10C1V3-20 | EIVLTQSPGTLSLSPGERATLCKSSQSVFYSSNQKNYLAWYQQKPG |
| | QAPRLLIYWASTRESGIPDRFSGSGSGTDFTLTISRLEPEDFAVYYCHQ |
| | YLSSLTFGQGTKVEIK (SEQ ID NO: 1432) |

Antibody 7E9

| | |
|---|---|
| 7E9V4-1 | DIVMTQSPDSLAVSLGERATINCKSSQSLLYSSNQKNCLAWYQQKPG |
| | QPPKLLIYWASTRESGVPDRFSGSGSGTDFTLTISSLQAEDVAVYYCQ |
| | QYYSYPLTFGQGTKVEIK (SEQ ID NO: 1434) |
| 7E9V2-28 | DIVMTQSPLSLPVTPGEPASISCKSSQSLLYSSNQKNCLAWYLQKPG |
| | QSPQLLIYWASTRESGVPDRFSGSGSGTDFTLKISRVEAEDVGVYYC |
| | QQYYSYPLTFGQGTKVEIK (SEQ ID NO: 1435) |
| 7E9V2-30 | DVVMTQSPLSLPVTLGQPASISCKSSQSLLYSSNQKNCLAWFQQRPG |
| | QSPRRLIYWASTRESGVPDRFSGSGSGTDFTLKISRVEAEDVGVYYC |
| | QQYYSYPLTFGQGTKVEIK (SEQ ID NO: 1436) |
| 7E9V1-9 | DIQLTQSPSFLSASVGDRVTITCKSSQSLLYSSNQKNCLAWYQQKPG |
| | KAPKLLIYWASTRESGVPSRFSGSGSGTEFTLTISSLQPEDFATYYCQ |
| | QYYSYPLTFGQGTKVEIK (SEQ ID NO: 1437) |
| 7E9V3-15 | EIVMTQSPATLSVSPGERATLSCKSSQSLLYSSNQKNCLAWYQQKPG |
| | QAPRLLIYWASTRESGIPARFSGSGSGTEFTLTISSLQSEDFAVYYCQQ |
| | YYSYPLTFGQGTKVEIK (SEQ ID NO: 1438) |
| 7E9V1-5 | DIQMTQSPSTLSASVGDRVTITCKSSQSLLYSSNQKNCLAWYQQKPG |
| | KAPKLLIYWASTRESGVPSRFSGSGSGTEFTLTISSLQPDDFATYYCQ |
| | QYYSYPLTFGQGTKVEIK (SEQ ID NO: 1439) |
| 7E9V1-33 | DIQMTQSPSSLSASVGDRVTITCKSSQSLLYSSNQKNCLAWYQQKPG |
| | KAPKLLIYWASTRESGVPSRFSGSGSGTDFTFTISSLQPEDIATYYCQQ |
| | YYSYPLTFGQGTKVEIK (SEQ ID NO: 1440) |
| 7E9V1-39 | DIQMTQSPSSLSASVGDRVTITCKSSQSLLYSSNQKNCLAWYQQKPG |
| | KAPKLLIYWASTRESGVPSRFSGSGSGTDFTLTISSLQPEDFATYYCQQ |
| | YYSYPLTFGQGTKVEIK (SEQ ID NO: 1441) |
| 7E9V3-11 | EIVLTQSPATLSLSPGERATLSCKSSQSLLYSSNQKNCLAWYQQKPG |
| | QAPRLLIYWASTRESGIPARFSGSGSGTDFTLTISSLEPEDFAVYYCQQ |
| | YYSYPLTFGQGTKVEIK (SEQ ID NO: 1442) |
| 7E9V3-20 | EIVLTQSPGTLSLSPGERATLSCKSSQSLLYSSNQKNCLAWYQQKPG |
| | QAPRLLIYWASTRESGIPDRFSGSGSGTDFTLTISRLEPEDFAVYYCQQ |
| | YYSYPLTFGQGTKVEIK (SEQ ID NO: 1443) |

Antibody 8C3

| | |
|---|---|
| 8C3V2-30 | DVVMTQSPLSLPVTLGQPASISCRSSQSLVHSNGNTYLHWFQQRPGQ |
| | SPRRLIYKVSNRFSGVPDRFSGSGSGTDFTLKISRVEAEDVGVYYCSQ |
| | STHVPPTFGQGTKVEIK (SEQ ID NO: 1445) |
| 8C3V2-28 | DIVMTQSPLSLPVTPGEPASISCRSSQSLVHSNGNTYLHWYLQKPGQSP |
| | QLLIYKVSNRFSGVPDRFSGSGSGTDFTLKISRVEAEDVGVYYCSQSTHV |
| | PPTFGQGTKVEIK (SEQ ID NO: 1446) |
| 8C3V4-1 | DIVMTQSPDSLAVSLGERATINCRSSQSLVHSNGNTYLHWYQQKPGQ |
| | PPKWYKVSNRFSGVPDRFSGSGSGTDFTLTISSLQAEDVAVYYCSQS |
| | THVPPTFGQGTKVEIK (SEQ ID NO: 1447) |
| 8C3V3-11 | EIVLTQSPATLSLSPGERATLSCRSSQSLVHSNGNTYLHWYQQKPGQ |
| | APRLLIYKVSNRFSGIPARFSGSGSGTDFTLTISSLEPEDFAVYYCSQST |
| | HVPPTFGQGTKVEIK (SEQ ID NO: 1448) |
| 8C3V1-33 | DIQMTQSPSSLSASVGDRVTITCRSSQSLVHSNGNTYLHWYQQKPGK |
| | APKLLIYKVSNRFSGVPSRFSGSGSGTDFTFTISSLQPEDIATYYCSQS |
| | THVPPTFGQGTKVEIK (SEQ ID NO: 1449) |
| 8C3V1-5 | DIQMTQSPSTLSASVGDRVTITCRSSQSLVHSNGNTYLHWYQQKPGK |
| | APKLLIYKVSNRFSGVPSRFSGSGSGTEFTLTISSLQPDDFATYYCSQST |
| | HVPPTFGQGTKVEIK (SEQ ID NO: 1450) |
| 8C3V1-39 | DIQMTQSPSSLSASVGDRVTITCRSSQSLVHSNGNTYLHWYQQKPGK |
| | APKWYKVSNRFSGVPSRFSGSGSGTDFTLTISSLQPEDFATYYCSQS |
| | THVPPTFGQGTKVEIK (SEQ ID NO: 1451) |
| 8C3V1-9 | DIQLTQSPSFLSASVGDRVTITCRSSQSLVHSNGNTYLHWYQQKPGK |
| | APKLLIYKVSNRFSGVPSRFSGSGSGTEFTLTISSLQPEDFATYYCSQS |
| | THVPPTFGQGTKVEIK (SEQ ID NO: 1452) |
| 8C3V3-15 | EIVMTQSPATLSVSPGERATLSCRSSQSLVHSNGNTYLHWYQQKPGQ |
| | APRLLIYKVSNRFSGIPARFSGSGSGTEFTLTISSLQSEDFAVYYCSQST |
| | HVPPTFGQGTKVEIK (SEQ ID NO: 1453) |
| 8C3V3-20 | EIVLTQSPGTLSLSPGERATLSCRSSQSLVHSNGNTYLHWYQQKPGQ |
| | APRLLIYKVSNRFSGIPDRFSGSGSGTDFTLTISRLEPEDFAVYYCSQST |
| | HVPPTFGQGTKVEIK (SEQ ID NO: 1454) |

TABLE D8
Humanized heavy chain variable region sequences

| | |
|---|---|
| Antibody variant | Humanized sequences |

Antibody 4D11

| | |
|---|---|
| 4D11V4-59 | QVQLQESGPGLVKPSETLSLTCTVSGFTLSSYAMSWIRQPPGKGLEW |
| | VASISRGGSTYYPPSLKSRVTISVDTSKNQFSLKLSSVTAADTAVYYC |
| | TRGYGYYRTPFANWGQGTLVTVSS (SEQ ID NO: 1220) |
| 4D11V3-23 | EVQLLESGGGLVQPGGSLRLSCAASGFTLSSYAMSWVRQAPGKGLE |
| | WVASISRGGSTYYPDSVKGRFTISRDNSKNTLYLQMNSLRAEDTAVY |
| | YCTRGYGYYRTPFANWGQGTLVTVSS (SEQ ID NO: 1221) |
| 4D11V3-7 | EVQLVESGGGLVQPGGSLRLSCAASGFTLSSYAMSWVRQAPGKGLE |
| | WVASISRGGSTYYPDSVKGRFTISRDNAKNSLYLQMNSLRAEDTAVY |
| | YCTRGYGYYRTPFANWGQGTLVTVSS (SEQ ID NO: 1222) |
| 4D11V3-48 | EVQLVESGGGLVQPGGSLRLSCAASGFTLSSYAMSWVRQAPGKGLE |
| | WVASISRGGSTYYPDSVKGRFTISRDNAKNSLYLQMNSLRAEDTAVY |
| | YCTRGYGYYRTPFANWGQGTLVTVSS (SEQ ID NO: 1222) |
| 4D11V3-30 | QVQLVESGGGVVQPGRSLRLSCAASGFTLSSYAMSWVRQAPGKGLE |
| | WVASISRGGSTYYPDSVKGRFTISRDNSKNTLYLQMNSLRAEDTAVY |
| | YCTRGYGYYRTPFANWGQGTLVTVSS (SEQ ID NO: 1223) |
| 4D11V1-69 | QVQLVQSGAEVKKPGSSVKVSCKASGFTLSSYAMSWVRQAPGQGLE |
| | WVASISRGGSTYYPQKFQGRVTITADESTSTAYMELSSLRSEDTAVYY |
| | CTRGYGYYRTPFANWGQGTLVTVSS (SEQ ID NO: 1224) |
| 4D11V1-46 | QVQLVQSGAEVKKPGASVKVSCKASGFTLSSYAMSWVRQAPGQGLE |
| | WVASISRGGSTYYPQKFQGRVTMTRDTSTSTVYMELSSLRSEDTAVY |
| | YCTRGYGYYRTPFANWGQGTLVTVSS (SEQ ID NO: 1225) |
| 4D11V5-51 | EVQLVQSGAEVKKPGESLKISCKGSGFTLSSYAMSWVRQMPGKGLE |
| | WVASISRGGSTYYPPSFQGQVTISADKSISTAYLQWSSLKASDTAMYY |
| | CTRGYGYYRTPFANWGQGTLVTVSS (SEQ ID NO: 1226) |
| 4D11V4-39 | QLQLQESGPGLVKPSETLSLTCTVSGFTLSSYAMSWIRQPPGKGLEW |
| | VASISRGGSTYYPPSLKSRVTISVDTSKNQFSLKLSSVTAADTAVYYC |
| | TRGYGYYRTPFANWGQGTLVTVSS (SEQ ID NO: 1227) |
| 4D11V4-30-4 | QVQLQESGPGLVKPSQTLSLTCTVSGFTLSSYAMSWIRQPPGKGLEW |
| | VASISRGGSTYYPPSLKSRVTISVDTSKNQFSLKLSSVTAADTAVYYC |
| | TRGYGYYRTPFANWGQGTLVTVSS (SEQ ID NO: 1228) |

Antibody 7C5

| | |
|---|---|
| 7C5V4-59 | QVQLQESGPGLVKPSETLSLTCTVSGFTLSSYAMSWIRQPPGKGLEW |
| | VASISRGGSTYYPPSLKSRVTISVDTSKNQFSLKLSSVTAADTAVYYC |
| | TRGYGYYRTPFANWGQGTLVTVSS (SEQ ID NO: 1220) |
| 7C5V3-23 | EVQLLESGGGLVQPGGSLRLSCAASGFTLSSYAMSWVRQAPGKGLE |
| | WVASISRGGSTYYPDSVKGRFTISRDNSKNTLYLQMNSLRAEDTAVY |
| | YCTRGYGYYRTPFANWGQGTLVTVSS (SEQ ID NO: 1221) |
| 7C5V3-7 | EVQLVESGGGLVQPGGSLRLSCAASGFTLSSYAMSWVRQAPGKGLE |
| | WVASISRGGSTYYPDSVKGRFTISRDNAKNSLYLQMNSLRAEDTAV |
| | YYCTRGYGYYRTPFANWGQGTLVTVSS (SEQ ID NO: 1222) |
| 7C5V3-48 | EVQLVESGGGLVQPGGSLRLSCAASGFTLSSYAMSWVRQAPGKGLE |
| | WVASISRGGSTYYPDSVKGRFTISRDNAKNSLYLQMNSLRAEDTAV |
| | YYCTRGYGYYRTPFANWGQGTLVTVSS (SEQ ID NO: 1222) |
| 7C5V3-30 | QVQLVESGGGVVQPGRSLRLSCAASGFTLSSYAMSWVRQAPGKGLE |
| | WVASISRGGSTYYPDSVKGRFTISRDNSKNTLYLQMNSLRAEDTAVY |
| | YCTRGYGYYRTPFANWGQGTLVTVSS (SEQ ID NO: 1223) |
| 7C5V1-69 | QVQLVQSGAEVKKPGSSVKVSCKASGFTLSSYAMSWVRQAPGQGLE |
| | WVASISRGGSTYYPQKFQGRVTITADESTSTAYMELSSLRSEDTAVY |
| | YCTRGYGYYRTPFANWGQGTLVTVSS (SEQ ID NO: 1224) |
| 7C5V1-46 | QVQLVQSGAEVKKPGASVKVSCKASGFTLSSYAMSWVRQAPGQGL |
| | EWVASISRGGSTYYPQKFQGRVTMTRDTSTSTVYMELSSLRSEDTAV |
| | YYCTRGYGYYRTPFANWGQGTLVTVSS (SEQ ID NO: 1225) |
| 7C5V5-51 | EVQLVQSGAEVKKPGESLKISCKGSGFTLSSYAMSWVRQMPGKGLE |
| | WVASISRGGSTYYPPSFQGQVTISADKSISTAYLQWSSLKASDTAMY |
| | YCTRGYGYYRTPFANWGQGTLVTVSS (SEQ ID NO: 1226) |
| 7C5V4-39 | QLQLQESGPGLVKPSETLSLTCTVSGFTLSSYAMSWIRQPPGKGLEW |
| | VASISRGGSTYYPPSLKSRVTISVDTSKNQFSLKLSSVTAADTAVYYC |
| | TRGYGYYRTPFANWGQGTLVTVSS (SEQ ID NO: 1227) |
| 7C5V4-30-4 | QVQLQESGPGLVKPSQTLSLTCTVSGFTLSSYAMSWIRQPPGKGLEW |
| | VASISRGGSTYYPPSLKSRVTISVDTSKNQFSLKLSSVTAADTAVYYC |
| | TRGYGYYRTPFANWGQGTLVTVSS (SEQ ID NO: 1228) |

Antibody 6G12

| | |
|---|---|
| 6G12V1-46 | QVQLVQSGAEVKKPGASVKVSCKASGYTFTEYTMHWVRQAPGQGL |
| | EWIGGINPNNGGTSYSQKFQGRVTMTRDTSTSTVYMELSSLRSEDTA |
| | VYYCARGGSHYYAMDYWGQGTLVTVSS (SEQ ID NO: 1230) |
| 6G12V5-51 | EVQLVQSGAEVKKPGESLKISCKGSGYTFTEYTMHWVRQMPGKGLE |
| | WIGGINPNNGGTSYSPSFQGQVTISADKSISTAYLQWSSLKASDTAMY |
| | YCARGGSHYYAMDYWGQGTLVTVSS (SEQ ID NO: 1231) |
| 6G12V1-69 | QVQLVQSGAEVKKPGSSVKVSCKASGYTFTEYTMEIWVRQAPGQGL |
| | EWIGGINPNNGGTSYSQKFQGRVTITADESTSTAYMELSSLRSEDTAV |
| | YYCARGGSHYYAMDYWGQGTLVTVSS (SEQ ID NO: 1232) |
| 6G12V3-23 | EVQLLESGGGLVQPGGSLRLSCAASGYTFTEYTMHWVRQAPGKGLE |
| | WIGGINPNNGGTSYSDSVKGRFTISRDNSKNTLYLQMNSLRAEDTAV |
| | YYCARGGSHYYAMDYWGQGTLVTVSS (SEQ ID NO: 1233) |
| 6G12V3-30 | QVQLVESGGGVVQPGRSLRLSCAASGYTFTEYTMEIWVRQAPGKGL |
| | EWIGGINPNNGGTSYSDSVKGRFTISRDNSKNTLYLQMNSLRAEDTA |
| | VYYCARGGSHYYAMDYWGQGTLVTVSS (SEQ ID NO: 1234) |
| 6G12V3-48 | EVQLVESGGGLVQPGGSLRLSCAASGYTFTEYTMHWVRQAPGKGLE |
| | WIGGINPNNGGTSYSDSVKGRFTISRDNAKNSLYLQMNSLRAEDTAV |
| | YYCARGGSHYYAMDYWGQGTLVTVSS (SEQ ID NO: 1235) |
| 6G12V3-7 | EVQLVESGGGLVQPGGSLRLSCAASGYTFTEYTMHWVRQAPGKGLE |
| | WIGGINPNNGGTSYSDSVKGRFTISRDNAKNSLYLQMNSLRAEDTAV |
| | YYCARGGSHYYAMDYWGQGTLVTVSS (SEQ ID NO: 1235) |
| 6G12V4-59 | QVQLQESGPGLVKPSETLSLTCTVSGYTFTEYTMHWIRQPPGKGLEW |
| | IGGINPNNGGTSYSPSLKSRVTISVDTSKNQFSLKLSSVTAADTAVYY |
| | CARGGSHYYAMDYWGQGTLVTVSS (SEQ ID NO: 1236) |
| 6G12V3-15 | EVQLVESGGGLVKPGGSLRLSCAASGYTFTEYTMHWVRQAPGKGLEWI |
| | GGINPNNGGTSYSAPVKGRFTISRDDSKNTLYLQMNSLKTEDTAVYYCA |
| | RGGSHYYAMDYWGQGTLVTVSS (SEQ ID NO: 1237) |
| 6G12V4-39 | QLQLQESGPGLVKPSETLSLTCTVSGYTFTEYTMHWIRQPPGKGLEWIGG |
| | INPNNGGTSYSPSLKSRVTISVDTSKNQFSLKLSSVTAADTAVYYCARGG |
| | SHYYAMDYWGQGTLVTVSS (SEQ ID NO: 1238) |

Antibody 8E10

| | |
|---|---|
| 8E10V1-46 | QVQLVQSGAEVKKPGASVKVSCKASGYTFTDYEMHWVRQAPGQGLEWI |
| | GVIDPETGGTAYNQKFQGRVTMTRDTSTSTVYMELSSLRSEDTAVYYCTS |
| | PDYYGSSYPLYYAMDYWGQGTLVTVSS (SEQ ID NO: 1240) |
| 8E10V5-51 | EVQLVQSGAEVKKPGESLKISCKGSGYTFTDYEMEIWVRQMPGKGLEWIG |
| | VIDPETGGTAYNPSFQGQVTISADKSISTAYLQWSSLKASDTAMYYCTSPD |
| | YYGSSYPLYYAMDYWGQGTLVTVSS (SEQ ID NO: 1241) |
| 8E10V3-30 | QVQLVESGGGVVQPGRSLRLSCAASGYTFTDYEMEIWVRQAPGKGLEWIG |
| | VIDPETGGTAYNDSVKGRFTISRDNSKNTLYLQMNSLRAEDTAVYYCTSP |
| | DYYGSSYPLYYAMDYWGQGTLVTVSS (SEQ ID NO: 1242) |
| 8E10V3-23 | EVQLLESGGGLVQPGGSLRLSCAASGYTFTDYEMEIWVRQAPGKGLEWIG |
| | VIDPETGGTAYNDSVKGRFTISRDNSKNTLYLQMNSLRAEDTAVYYCTSP |
| | DYYGSSYPLYYAMDYWGQGTLVTVSS (SEQ ID NO: 1243) |
| 8E10V1-69 | QVQLVQSGAEVKKPGSSVKVSCKASGYTFTDYEMEIWVRQAPGQGLEWI |
| | GVIDPETGGTAYNQKFQGRVTITADESTSTAYMELSSLRSEDTAVYYCTSP |
| | DYYGSSYPLYYAMDYWGQGTLVTVSS (SEQ ID NO: 1244) |
| 8E10V3-48 | EVQLVESGGGLVQPGGSLRLSCAASGYTFTDYENIHWVRQAPGKGLEWIG |
| | VIDPETGGTAYNDSVKGRFTISRDNAKNSLYLQMNSLRAEDTAVYYCTSP |
| | DYYGSSYPLYYAMDYWGQGTLVTVSS (SEQ ID NO: 1245) |
| 8E10V3-7 | EVQLVESGGGLVQPGGSLRLSCAASGYTFTDYENIHWVRQAPGKGLEWIG |
| | VIDPETGGTAYNDSVKGRFTISRDNAKNSLYLQMNSLRAEDTAVYYCTSP |
| | DYYGSSYPLYYAMDYWGQGTLVTVSS (SEQ ID NO: 1245) |
| 8E10V4-59 | QVQLQESGPGLVKPSETLSLTCTVSGYTFTDYENIHWIRQPPGKGLEWIGVI |
| | DPETGGTAYNPSLKSRVTISVDTSKNQFSLKLSSVTAADTAVYYCTSPDYY |
| | GSSYPLYYAMDYWGQGTLVTVSS (SEQ ID NO: 1246) |
| 8E10V3-15 | EVQLVESGGGLVKPGGSLRLSCAASGYTFTDYENIHWVRQAPGKGLEWIG |
| | VIDPETGGTAYNAPVKGRFTISRDDSKNTLYLQMNSLKTEDTAVYYCTSP |
| | DYYGSSYPLYYAMDYWGQGTLVTVSS (SEQ ID NO: 1247) |
| 8E10V4-39 | QLQLQESGPGLVKPSETLSLTCTVSGYTFTDYENIHWIRQPPGKGLEWIGVI |
| | DPETGGTAYNPSLKSRVTISVDTSKNQFSLKLSSVTAADTAVYYCTSPDYY |
| | GSSYPLYYAMDYWGQGTLVTVSS (SEQ ID NO: 1248) |

Antibody 7E5

| | |
|---|---|
| 7E5V3-15 | EVQLVESGGGLVKPGGSLRLSCAASGFTFSDAWMGWVRQAPGKGLEWV |
| | AEIRDKVKNHATYYAAPVKGRFTISRDDSKNTLYLQMNSLKTEDTAVYY |
| | CRLGVFDYWGQGTLVTVSS (SEQ ID NO: 1250) |
| 7E5V3-7 | EVQLVESGGGLVQPGGSLRLSCAASGFTFSDAWMGWVRQAPGKGLEWV |
| | AEIRDKVKNHATYYADSVKGRFTISRDNAKNSLYLQMNSLRAEDTAVYY |
| | CRLGVFDYWGQGTLVTVSS (SEQ ID NO: 1251) |
| 7E5V3-23 | EVQLLESGGGLVQPGGSLRLSCAASGFTFSDAWMGWVRQAPGKGLEWV |
| | AEIRDKVKNHATYYADSVKGRFTISRDNSKNTLYLQMNSLRAEDTAVYY |
| | CRLGVFDYWGQGTLVTVSS (SEQ ID NO: 1252) |
| 7E5V3-48 | EVQLVESGGGLVQPGGSLRLSCAASGFTFSDAWMGWVRQAPGKGLEWV |
| | AEIRDKVKNHATYYADSVKGRFTISRDNAKNSLYLQMNSLRAEDTAVYY |
| | CRLGVFDYWGQGTLVTVSS (SEQ ID NO: 1251) |
| 7E5V3-30 | QVQLVESGGGVVQPGRSLRLSCAASGFTFSDAWMGWVRQAPGKGLEWV |
| | AEIRDKVKNHATYYADSVKGRFTISRDNSKNTLYLQMNSLRAEDTAVYY |
| | CRLGVFDYWGQGTLVTVSS (SEQ ID NO: 1253) |
| 7E5V1-69 | QVQLVQSGAEVKKPGSSVKVSCKASGFTFSDAWMGWVRQAPGQGLEWV |
| | AEIRDKVKNHATYYAQKFQGRVTITADESTSTAYMELSSLRSEDTAVYYC |
| | RLGVFDYWGQGTLVTVSS (SEQ ID NO: 1254) |
| 7E5V1-46 | QVQLVQSGAEVKKPGASVKVSCKASGFTFSDAWMGWVRQAPGQGLEW |
| | VAEIRDKVKNHATYYAQKFQGRVTMTRDTSTSTVYMELSSLRSEDTAVY |
| | YCRLGVFDYWGQGTLVTVSS (SEQ ID NO: 1255) |
| 7E5V5-51 | EVQLVQSGAEVKKPGESLKISCKGSGFTFSDAWMGWVRQMPGKGLEWV |
| | AEIRDKVKNHATYYAPSFQGQVTISADKSISTAYLQWSSLKASDTAMYYC |
| | RLGVFDYWGQGTLVTVSS (SEQ ID NO: 1256) |
| 7E5V4-59 | QVQLQESGPGLVKPSETLSLTCTVSGFTFSDAWMGWIRQPPGKGLEWVAE |
| | IRDKVKNHATYYAPSLKSRVTISVDTSKNQFSLKLSSVTAADTAVYYCRL |
| | GVFDYWGQGTLVTVSS (SEQ ID NO: 1257) |
| 7E5V4-39 | QLQLQESGPGLVKPSETLSLTCTVSGFTFSDAWMGWIRQPPGKGLEWVAE |
| | IRDKVKNHATYYAPSLKSRVTISVDTSKNQFSLKLSSVTAADTAVYYCRL |
| | GVFDYWGQGTLVTVSS (SEQ ID NO: 1258) |

Antibody 7F8

| | |
|---|---|
| 7F8V3-15 | EVQLVESGGGLVKPGGSLRLSCAASGFSFNTYAMNWVRQAPGKGLEWIA |
| | RIRSKSNNYATYYAAPVKGRFTISRDDSKNTLYLQMNSLKTEDTAVYYCV |
| | RHGDGNLWYIDVWGQGTLVTVSS (SEQ ID NO: 1260) |
| 7F8V3-48 | EVQLVESGGGLVQPGGSLRLSCAASGFSFNTYAMNWVRQAPGKGLEWIA |
| | RIRSKSNNYATYYADSVKGRFTISRDNAKNSLYLQMNSLRAEDTAVYYCV |
| | RHGDGNLWYIDVWGQGTLVTVSS (SEQ ID NO: 1261) |
| 7F8V3-23 | EVQLLESGGGLVQPGGSLRLSCAASGFSFNTYAMNWVRQAPGKGLEWIA |
| | RIRSKSNNYATYYADSVKGRFTISRDNSKNTLYLQMNSLRAEDTAVYYCV |
| | RHGDGNLWYIDVWGQGTLVTVSS (SEQ ID NO: 1262) |
| 7F8V3-7 | EVQLVESGGGLVQPGGSLRLSCAASGFSFNTYAMNWVRQAPGKGLEWIA |
| | RIRSKSNNYATYYADSVKGRFTISRDNAKNSLYLQMNSLRAEDTAVYYCV |
| | RHGDGNLWYIDVWGQGTLVTVSS (SEQ ID NO: 1261) |
| 7F8V3-30 | QVQLVESGGGVVQPGRSLRLSCAASGFSFNTYAMNWVRQAPGKGLEWIA |
| | RIRSKSNNYATYYADSVKGRFTISRDNSKNTLYLQMNSLRAEDTAVYYCV |
| | RHGDGNLWYIDVWGQGTLVTVSS (SEQ ID NO: 1263) |
| 7F8V1-69 | QVQLVQSGAEVKKPGSSVKVSCKASGFSFNTYAMNWVRQAPGQGLEWI |
| | ARIRSKSNNYATYYAQKFQGRVTITADESTSTAYMELSSLRSEDTAVYYC |
| | VRHGDGNLWYIDVWGQGTLVTVSS (SEQ ID NO: 1264) |
| 7F8V5-51 | EVQLVQSGAEVKKPGESLKISCKGSGFSFNTYAMNWVRQMPGKGLEWIA |
| | RIRSKSNNYATYYAPSFQGQVTISADKSISTAYLQWSSLKASDTAMYYCV |
| | RHGDGNLWYIDVWGQGTLVTVSS (SEQ ID NO: 1265) |
| 7F8V1-46 | QVQLVQSGAEVKKPGASVKVSCKASGFSFNTYAMNWVRQAPGQGLEWI |
| | ARIRSKSNNYATYYAQKFQGRVTMTRDTSTSTVYMELSSLRSEDTAVYYC |
| | VRHGDGNLWYIDVWGQGTLVTVSS (SEQ ID NO: 1266) |
| 7F8V4-59 | QVQLQESGPGLVKPSETLSLTCTVSGFSFNTYAMNWIRQPPGKGLEWIARI |
| | RSKSNNYATYYAPSLKSRVTISVDTSKNQFSLKLSSVTAADTAVYYCVRH |
| | GDGNLWYIDVWGQGTLVTVSS (SEQ ID NO: 1267) |
| 7F8V4-30-4 | QVQLQESGPGLVKPSQTLSLTCTVSGFSFNTYAMNWIRQPPGKGLEWIARI |
| | RSKSNNYATYYAPSLKSRVTISVDTSKNQFSLKLSSVTAADTAVYYCVRH |
| | GDGNLWYIDVWGQGTLVTVSS (SEQ ID NO: 1268) |

Antibody 8F8

| | |
|---|---|
| 8F8V1-46 | QVQLVQSGAEVKKPGASVKVSCKASGYTVSRYWMIHWVRQAPGQGLEWI |
| | GRIDPNSGGTKYNQKFQGRVTMTRDTSTSTVYMELSSLRSEDTAVYYCVL |
| | TGTDFDYWGQGTLVTVSS (SEQ ID NO: 1270) |
| 8F8V3-23 | EVQLLESGGGLVQPGGSLRLSCAASGYTVSRYWMHWVRQAPGKGLEWI |
| | GRIDPNSGGTKYNDSVKGRFTISRDNSKNTLYLQMNSLRAEDTAVYYCVL |
| | TGTDFDYWGQGTLVTVSS (SEQ ID NO: 1271) |
| 8F8V1-69 | QVQLVQSGAEVKKPGSSVKVSCKASGYTVSRYWMHWVRQAPGQGLEWI |
| | GRIDPNSGGTKYNQKFQGRVTITADESTSTAYMELSSLRSEDTAVYYCVLT |
| | GTDFDYWGQGTLVTVSS (SEQ ID NO: 1272) |
| 8F8V5-51 | EVQLVQSGAEVKKPGESLKISCKGSGYTVSRYWMHWVRQMPGKGLEWI |
| | GRIDPNSGGTKYNPSFQGQVTISADKSISTAYLQWSSLKASDTAMYYCVLT |
| | GTDFDYWGQGTLVTVSS (SEQ ID NO: 1273) |
| 8F8V3-48 | EVQLVESGGGLVQPGGSLRLSCAASGYTVSRYWMHWVRQAPGKGLEWI |
| | GRIDPNSGGTKYNDSVKGRFTISRDNAKNSLYLQMNSLRAEDTAVYYCVL |
| | TGTDFDYWGQGTLVTVSS (SEQ ID NO: 1274) |
| 8F8V3-30 | QVQLVESGGGVVQPGRSLRLSCAASGYTVSRYWMHWVRQAPGKGLEWI |
| | GRIDPNSGGTKYNDSVKGRFTISRDNSKNTLYLQMNSLRAEDTAVYYCVL |
| | TGTDFDYWGQGTLVTVSS (SEQ ID NO: 1275) |
| 8F8V3-7 | EVQLVESGGGLVQPGGSLRLSCAASGYTVSRYWMHWVRQAPGKGLEWI |
| | GRIDPNSGGTKYNDSVKGRFTISRDNAKNSLYLQMNSLRAEDTAVYYCVL |
| | TGTDFDYWGQGTLVTVSS (SEQ ID NO: 1274) |
| 8F8V4-59 | QVQLQESGPGLVKPSETLSLTCTVSGYTVSRYWMHWIRQPPGKGLEWIGR |
| | IDPNSGGTKYNPSLKSRVTISVDTSKNQFSLKLSSVTAADTAVYYCVLTGT |
| | DFDYWGQGTLVTVSS (SEQ ID NO: 1276) |
| 8F8V3-15 | EVQLVESGGGLVKPGGSLRLSCAASGYTVSRYWMHWVRQAPGKGLEWI |
| | GRIDPNSGGTKYNAPVKGRFTISRDDSKNTLYLQMNSLKTEDTAVYYCVL |
| | TGTDFDYWGQGTLVTVSS (SEQ ID NO: 1277) |
| 8F8V4-30-4 | QVQLQESGPGLVKPSQTLSLTCTVSGYTVSRYWNIHWIRQPPGKGLEWIGR |
| | IDPNSGGTKYNPSLKSRVTISVDTSKNQFSLKLSSVTAADTAVYYCVLTGT |
| | DFDYWGQGTLVTVSS (SEQ ID NO: 1278) |

Antibody1H7

| | |
|---|---|
| 1H7V3-15 | EVQLVESGGGLVKPGGSLRLSCAASGFSFNTYAMNWVRQAPGKGLEWIA |
| | RIRSKSNNYATYYAAPVKGRFTISRDDSKNTLYLQMNSLKTEDTAVYYCV |
| | RHGDGNLWYIDVWGQGTLVTVSS (SEQ ID NO: 1260) |
| 1H7V3-23 | EVQLLESGGGLVQPGGSLRLSCAASGFSFNTYAMNWVRQAPGKGLEWIA |
| | RIRSKSNNYATYYADSVKGRFTISRDNSKNTLYLQMNSLRAEDTAVYYCV |
| | RHGDGNLWYIDVWGQGTLVTVSS (SEQ ID NO: 1262) |
| 1H7V3-48 | EVQLVESGGGLVQPGGSLRLSCAASGFSFNTYAMNWVRQAPGKGLEWIA |
| | RIRSKSNNYATYYADSVKGRFTISRDNAKNSLYLQMNSLRAEDTAVYYCV |
| | RHGDGNLWYIDVWGQGTLVTVSS (SEQ ID NO: 1261) |
| 1H7V3-7 | EVQLVESGGGLVQPGGSLRLSCAASGFSFNTYAMNWVRQAPGKGLEWIA |
| | RIRSKSNNYATYYADSVKGRFTISRDNAKNSLYLQMNSLRAEDTAVYYCV |
| | RHGDGNLWYIDVWGQGTLVTVSS (SEQ ID NO: 1261) |
| 1H7V3-30 | QVQLVESGGGVVQPGRSLRLSCAASGFSFNTYAMNWVRQAPGKGLEWIA |
| | RIRSKSNNYATYYADSVKGRFTISRDNSKNTLYLQMNSLRAEDTAVYYCV |
| | RHGDGNLWYIDVWGQGTLVTVSS (SEQ ID NO: 1263) |
| 1H7V5-51 | EVQLVQSGAEVKKPGESLKISCKGSGFSFNTYAMNWVRQMPGKGLEWIA |
| | RIRSKSNNYATYYAPSFQGQVTISADKSISTAYLQWSSLKASDTAMYYCV |
| | RHGDGNLWYIDVWGQGTLVTVSS (SEQ ID NO: 1265) |
| 1H7V1-69 | QVQLVQSGAEVKKPGSSVKVSCKASGFSFNTYAMNWVRQAPGQGLEWI |
| | ARIRSKSNNYATYYAQKFQGRVTITADESTSTAYMELSSLRSEDTAVYYC |
| | VRHGDGNLWYIDVWGQGTLVTVSS (SEQ ID NO: 1264) |
| 1H7V1-46 | QVQLVQSGAEVKKPGASVKVSCKASGFSFNTYAMNWVRQAPGQGLEWI |
| | ARIRSKSNNYATYYAQKFQGRVTMTRDTSTSTVYMELSSLRSEDTAVYYC |
| | VRHGDGNLWYIDVWGQGTLVTVSS (SEQ ID NO: 1266) |
| 1H7V4-59 | QVQLQESGPGLVKPSETLSLTCTVSGFSFNTYAMNWIRQPPGKGLEWIARI |
| | RSKSNNYATYYAPSLKSRVTISVDTSKNQFSLKLSSVTAADTAVYYCVRH |
| | GDGNLWYIDVWGQGTLVTVSS (SEQ ID NO: 1267) |
| 1H7V4-30-4 | QVQLQESGPGLVKPSQTLSLTCTVSGFSFNTYAMNWIRQPPGKGLEWIARI |
| | RSKSNNYATYYAPSLKSRVTISVDTSKNQFSLKLSSVTAADTAVYYCVRH |
| | GDGNLWYIDVWGQGTLVTVSS (SEQ ID NO: 1268) |

Antibody 2H8

| | |
|---|---|
| 2H8V3-15 | EVQLVESGGGLVKPGGSLRLSCAASGFSFNTYAMNWVRQAPGKGLEWIA |
| | RIRSKSNNYATYYAAPVKGRFTISRDDSKNTLYLQMNSLKTEDTAVYYCV |
| | RHGDGNLWYIDVWGQGTLVTVSS (SEQ ID NO: 1260) |
| 2H8V3-48 | EVQLVESGGGLVQPGGSLRLSCAASGFSFNTYAMNWVRQAPGKGLEWIA |
| | RIRSKSNNYATYYADSVKGRFTISRDNAKNSLYLQMNSLRAEDTAVYYCV |
| | RHGDGNLWYIDVWGQGTLVTVSS (SEQ ID NO: 1261) |
| 2H8V3-23 | EVQLLESGGGLVQPGGSLRLSCAASGFSFNTYAMNWVRQAPGKGLEWIA |
| | RIRSKSNNYATYYADSVKGRFTISRDNSKNTLYLQMNSLRAEDTAVYYCV |
| | RHGDGNLWYIDVWGQGTLVTVSS (SEQ ID NO: 1262) |
| 2H8V3-7 | EVQLVESGGGLVQPGGSLRLSCAASGFSFNTYAMNWVRQAPGKGLEWIA |
| | RIRSKSNNYATYYADSVKGRFTISRDNAKNSLYLQMNSLRAEDTAVYYCV |
| | RHGDGNLWYIDVWGQGTLVTVSS (SEQ ID NO: 1261) |
| 2H8V3-30 | QVQLVESGGGVVQPGRSLRLSCAASGFSFNTYAMNWVRQAPGKGLEWIA |
| | RIRSKSNNYATYYADSVKGRFTISRDNSKNTLYLQMNSLRAEDTAVYYCV |
| | RHGDGNLWYIDVWGQGTLVTVSS (SEQ ID NO: 1263) |
| 2H8V5-51 | EVQLVQSGAEVKKPGESLKISCKGSGFSFNTYAMNWVRQMPGKGLEWIA |
| | RIRSKSNNYATYYAPSFQGQVTISADKSISTAYLQWSSLKASDTAMYYCV |
| | RHGDGNLWYIDVWGQGTLVTVSS (SEQ ID NO: 1265) |
| 2H8V1-69 | QVQLVQSGAEVKKPGSSVKVSCKASGFSFNTYAMNWVRQAPGQGLEWI |
| | ARIRSKSNNYATYYAQKFQGRVTITADESTSTAYMELSSLRSEDTAVYYC |
| | VRHGDGNLWYIDVWGQGTLVTVSS (SEQ ID NO: 1264) |
| 2H8V1-46 | QVQLVQSGAEVKKPGASVKVSCKASGFSFNTYAMNWVRQAPGQGLEWI |
| | ARIRSKSNNYATYYAQKFQGRVTMTRDTSTSTVYMELSSLRSEDTAVYYC |
| | VRHGDGNLWYIDVWGQGTLVTVSS (SEQ ID NO: 1266) |
| 2H8V4-59 | QVQLQESGPGLVKPSETLSLTCTVSGFSFNTYAMNWIRQPPGKGLEWIARI |
| | RSKSNNYATYYAPSLKSRVTISVDTSKNQFSLKLSSVTAADTAVYYCVRH |
| | GDGNLWYIDVWGQGTLVTVSS (SEQ ID NO: 1267) |
| 2H8V4-30-4 | QVQLQESGPGLVKPSQTLSLTCTVSGFSFNTYAMNWIRQPPGKGLEWIARI |
| | RSKSNNYATYYAPSLKSRVTISVDTSKNQFSLKLSSVTAADTAVYYCVRH |
| | GDGNLWYIDVWGQGTLVTVSS (SEQ ID NO: 1268) |

Antibody 3A2

| | |
|---|---|
| 3A2V5-51 | EVQLVQSGAEVKKPGESLKISCKGSGYPFSNFWITWVRQMPGKGLEWIGD |
| | IYPGSDNSNYNPSFQGQVTISADKSISTAYLQWSSLKASDTAMYYCAREAY |
| | YTNPGFAYWGQGTLVTVSS (SEQ ID NO: 1282) |
| 3A2V1-69 | QVQLVQSGAEVKKPGSSVKVSCKASGYPFSNFWITWVRQAPGQGLEWIG |
| | DIYPGSDNSNYNQKFQGRVTITADESTSTAYMELSSLRSEDTAVYYCAREA |
| | YYTNPGFAYWGQGTLVTVSS (SEQ ID NO: 1283) |
| 3A2V1-46 | QVQLVQSGAEVKKPGASVKVSCKASGYPFSNFWITWVRQAPGQGLEWIG |
| | DIYPGSDNSNYNQKFQGRVTMTRDTSTSTVYMELSSLRSEDTAVYYCARE |
| | AYYTNPGFAYWGQGTLVTVSS (SEQ ID NO: 1284) |
| 3A2V3-48 | EVQLVESGGGLVQPGGSLRLSCAASGYPFSNFWITWVRQAPGKGLEWIGD |
| | IYPGSDNSNYNDSVKGRFTISRDNAKNSLYLQMNSLRAEDTAVYYCAREA |
| | YYTNPGFAYWGQGTLVTVSS (SEQ ID NO: 1285) |
| 3A2V3-30 | QVQLVESGGGVVQPGRSLRLSCAASGYPFSNFWITWVRQAPGKGLEWIG |
| | DIYPGSDNSNYNDSVKGRFTISRDNSKNTLYLQMNSLRAEDTAVYYCARE |
| | AYYTNPGFAYWGQGTLVTVSS (SEQ ID NO: 1286) |
| 3A2V3-7 | EVQLVESGGGLVQPGGSLRLSCAASGYPFSNFWITWVRQAPGKGLEWIGD |
| | IYPGSDNSNYNDSVKGRFTISRDNAKNSLYLQMNSLRAEDTAVYYCAREA |
| | YYTNPGFAYWGQGTLVTVSS (SEQ ID NO: 1285) |
| 3A2V3-23 | EVQLLESGGGLVQPGGSLRLSCAASGYPFSNFWITWVRQAPGKGLEWIGD |
| | IYPGSDNSNYNDSVKGRFTISRDNSKNTLYLQMNSLRAEDTAVYYCAREA |
| | YYTNPGFAYWGQGTLVTVSS (SEQ ID NO: 1287) |
| 3A2V4-59 | QVQLQESGPGLVKPSETLSLTCTVSGYPFSNFWITWIRQPPGKGLEWIGDIY |
| | PGSDNSNYNPSLKSRVTISVDTSKNQFSLKLSSVTAADTAVYYCAREAYY |
| | TNPGFAYWGQGTLVTVSS (SEQ ID NO: 1288) |
| IGHV3-15 | EVQLVESGGGLVKPGGSLRLSCAASGYPFSNFWITWVRQAPGKGLEWIGD |
| | IYPGSDNSNYNAPVKGRFTISRDDSKNTLYLQMNSLKTEDTAVYYCAREA |
| | YYTNPGFAYWGQGTLVTVSS (SEQ ID NO: 1289) |
| 3A2V4-39 | QLQLQESGPGLVKPSETLSLTCTVSGYPFSNFWITWIRQPPGKGLEWIGDIY |
| | PGSDNSNYNPSLKSRVTISVDTSKNQFSLKLSSVTAADTAVYYCAREAYY |
| | TNPGFAYWGQGTLVTVSS (SEQ ID NO: 1290) |

Antibody 3A7

| | |
|---|---|
| 3A7V3-15 | EVQLVESGGGLVKPGGSLRLSCAASGFTFSDAWMGWVRQAPGKGLEWV |
| | AEIRDKVKNHATYYAAPVKGRFTISRDDSKNTLYLQMNSLKTEDTAVYY |
| | CRLGVFDYWGQGTLVTVSS (SEQ ID NO: 1250) |
| 3A7V3-7 | EVQLVESGGGLVQPGGSLRLSCAASGFTFSDAWMGWVRQAPGKGLEWV |
| | AEIRDKVKNHATYYADSVKGRFTISRDNAKNSLYLQMNSLRAEDTAVYY |
| | CRLGVFDYWGQGTLVTVSS (SEQ ID NO: 1251) |
| 3A7V3-23 | EVQLLESGGGLVQPGGSLRLSCAASGFTFSDAWMGWVRQAPGKGLEWV |
| | AEIRDKVKNHATYYADSVKGRFTISRDNSKNTLYLQMNSLRAEDTAVYY |
| | CRLGVFDYWGQGTLVTVSS (SEQ ID NO: 1252) |
| 3A7V3-48 | EVQLVESGGGLVQPGGSLRLSCAASGFTFSDAWMGWVRQAPGKGLEWV |
| | AEIRDKVKNHATYYADSVKGRFTISRDNAKNSLYLQMNSLRAEDTAVYY |
| | CRLGVFDYWGQGTLVTVSS (SEQ ID NO: 1251) |
| 3A7V3-30 | QVQLVESGGGVVQPGRSLRLSCAASGFTFSDAWMGWVRQAPGKGLEWV |
| | AEIRDKVKNHATYYADSVKGRFTISRDNSKNTLYLQMNSLRAEDTAVYY |
| | CRLGVFDYWGQGTLVTVSS (SEQ ID NO: 1253) |
| 3A7V1-69 | QVQLVQSGAEVKKPGSSVKVSCKASGFTFSDAWMGWVRQAPGQGLEWV |
| | AEIRDKVKNHATYYAQKFQGRVTITADESTSTAYMELSSLRSEDTAVYYC |
| | RLGVFDYWGQGTLVTVSS (SEQ ID NO: 1254) |
| 3A7V1-46 | QVQLVQSGAEVKKPGASVKVSCKASGFTFSDAWMGWVRQAPGQGLEW |
| | VAEIRDKVKNHATYYAQKFQGRVTMTRDTSTSTVYMELSSLRSEDTAVY |
| | YCRLGVFDYWGQGTLVTVSS (SEQ ID NO: 1255) |
| 3A7V5-51 | EVQLVQSGAEVKKPGESLKISCKGSGFTFSDAWMGWVRQMPGKGLEWV |
| | AEIRDKVKNHATYYAPSFQGQVTISADKSISTAYLQWSSLKASDTAMYYC |
| | RLGVFDYWGQGTLVTVSS (SEQ ID NO: 1256) |
| 3A7V4-59 | QVQLQESGPGLVKPSETLSLTCTVSGFTFSDAWMGWIRQPPGKGLEWVAE |
| | IRDKVKNHATYYAPSLKSRVTISVDTSKNQFSLKLSSVTAADTAVYYCRL |
| | GVFDYWGQGTLVTVSS (SEQ ID NO: 1257) |
| 3A7V4-39 | QLQLQESGPGLVKPSETLSLTCTVSGFTFSDAWMGWIRQPPGKGLEWVAE |
| | IRDKVKNHATYYAPSLKSRVTISVDTSKNQFSLKLSSVTAADTAVYYCRL |
| | GVFDYWGQGTLVTVSS (SEQ ID NO: 1258) |

Antibody 3B10

| | |
|---|---|
| 3B10V3-15 | EVQLVESGGGLVKPGGSLRLSCAASGLTSNTYTQTWVRQAPGKGLEWES |
| | VIRSKSNNFSTLYAAPVKGRFTISRDD SKNTLYLQMNSLKTEDTAVYYCV |
| | RHKSNRYPGVYWGQGTLVTVSS (SEQ ID NO: 1292) |
| 3B10V3-30 | QVQLVESGGGVVQPGRSLRLSCAASGLTSNTYTQTWVRQAPGKGLEWES |
| | VIRSKSNNFSTLYADSVKGRFTISRDNSKNTLYLQMNSLRAEDTAVYYCV |
| | RHKSNRYPGVYWGQGTLVTVSS (SEQ ID NO: 1293) |
| 3B10V3-23 | EVQLLESGGGLVQPGGSLRLSCAASGLTSNTYTQTWVRQAPGKGLEWES |
| | VIRSKSNNFSTLYADSVKGRFTISRDNSKNTLYLQMNSLRAEDTAVYYCV |
| | RHKSNRYPGVYWGQGTLVTVSS (SEQ ID NO: 1294) |
| 3B10V1-46 | QVQLVQSGAEVKKPGASVKVSCKASGLTSNTYTQTWVRQAPGQGLEWE |
| | SVIRSKSNNFSTLYAQKFQGRVTMTRDTSTSTVYMELSSLRSEDTAVYYC |
| | VRHKSNRYPGVYWGQGTLVTVSS (SEQ ID NO: 1295) |
| 3B10V3-48 | EVQLVESGGGLVQPGGSLRLSCAASGLTSNTYTQTWVRQAPGKGLEWES |
| | VIRSKSNNFSTLYADSVKGRFTISRDNAKNSLYLQMNSLRAEDTAVYYCV |
| | RHKSNRYPGVYWGQGTLVTVSS (SEQ ID NO: 1296) |
| 3B10V1-69 | QVQLVQSGAEVKKPGSSVKVSCKASGLTSNTYTQTWVRQAPGQGLEWES |
| | VIRSKSNNFSTLYAQKFQGRVTITADESTSTAYMELSSLRSEDTAVYYCVR |
| | HKSNRYPGVYWGQGTLVTVSS (SEQ ID NO: 1297) |
| 3B10V3-7 | EVQLVESGGGLVQPGGSLRLSCAASGLTSNTYTQTWVRQAPGKGLEWES |
| | VIRSKSNNFSTLYADSVKGRFTISRDNAKNSLYLQMNSLRAEDTAVYYCV |
| | RHKSNRYPGVYWGQGTLVTVSS (SEQ ID NO: 1296) |
| 3B10V5-51 | EVQLVQSGAEVKKPGESLKISCKGSGLTSNTYTQTWVRQMPGKGLEWES |
| | VIRSKSNNFSTLYAPSFQGQVTISADKSISTAYLQWSSLKASDTAMYYCVR |
| | HKSNRYPGVYWGQGTLVTVSS (SEQ ID NO: 1298) |
| 3B10V4-59 | QVQLQESGPGLVKPSETLSLTCTVSGLTSNTYTQTWIRQPPGKGLEWESVI |
| | RSKSNNFSTLYAPSLKSRVTISVDTSKNQFSLKLSSVTAADTAVYYCVRHK |
| | SNRYPGVYWGQGTLVTVSS (SEQ ID NO: 1299) |
| 3B10V4-39 | QLQLQESGPGLVKPSETLSLTCTVSGLTSNTYTQTWIRQPPGKGLEWESVI |
| | RSKSNNFSTLYAPSLKSRVTISVDTSKNQFSLKLSSVTAADTAVYYCVRHK |
| | SNRYPGVYWGQGTLVTVSS (SEQ ID NO: 1300) |

Antibody 4F11

| | |
|---|---|
| 4F11V5-51 | EVQLVQSGAEVKKPGESLKISCKGSGYPFSNFWITWVRQMPGKGLEWIGD |
| | IYPGSDNSNYNPSFQGQVTISADKSISTAYLQWSSLKASDTAMYYCAREAY |
| | YTNPGFAYWGQGTLVTVSS (SEQ ID NO: 1282) |
| 4F11V1-69 | QVQLVQSGAEVKKPGSSVKVSCKASGYPFSNFWITWVRQAPGQGLEWIG |
| | DIYPGSDNSNYNQKFQGRVTITADESTSTAYMELSSLRSEDTAVYYCAREA |
| | YYTNPGFAYWGQGTLVTVSS (SEQ ID NO: 1283) |
| 4F 11V1-46 | QVQLVQSGAEVKKPGASVKVSCKASGYPFSNFWITWVRQAPGQGLEWIG |
| | DIYPGSDNSNYNQKFQGRVTMTRDTSTSTVYMELSSLRSEDTAVYYCARE |
| | AYYTNPGFAYWGQGTLVTVSS (SEQ ID NO: 1284) |
| 4F11V3-48 | EVQLVESGGGLVQPGGSLRLSCAASGYPFSNFWITWVRQAPGKGLEWIGD |
| | IYPGSDNSNYNDSVKGRFTISRDNAKNSLYLQMNSLRAEDTAVYYCAREA |
| | YYTNPGFAYWGQGTLVTVSS (SEQ ID NO: 1285) |
| 4F11V3-30 | QVQLVESGGGVVQPGRSLRLSCAASGYPFSNFWITWVRQAPGKGLEWIG |
| | DIYPGSDNSNYNDSVKGRFTISRDNSKNTLYLQMNSLRAEDTAVYYCARE |
| | AYYTNPGFAYWGQGTLVTVSS (SEQ ID NO: 1286) |
| 4F11V3-7 | EVQLVESGGGLVQPGGSLRLSCAASGYPFSNFWITWVRQAPGKGLEWIGD |
| | IYPGSDNSNYNDSVKGRFTISRDNAKNSLYLQMNSLRAEDTAVYYCAREA |
| | YYTNPGFAYWGQGTLVTVSS (SEQ ID NO: 1285) |
| 4F11V3-23 | EVQLLESGGGLVQPGGSLRLSCAASGYPFSNFWITWVRQAPGKGLEWIGD |
| | IYPGSDNSNYNDSVKGRFTISRDNSKNTLYLQMNSLRAEDTAVYYCAREA |
| | YYTNPGFAYWGQGTLVTVSS (SEQ ID NO: 1287) |
| 4F11V4-59 | QVQLQESGPGLVKPSETLSLTCTVSGYPFSNFWITWIRQPPGKGLEWIGDIY |
| | PGSDNSNYNPSLKSRVTISVDTSKNQFSLKLSSVTAADTAVYYCAREAYY |
| | TNPGFAYWGQGTLVTVSS (SEQ ID NO: 1288) |
| 4F11V3-15 | EVQLVESGGGLVKPGGSLRLSCAASGYPFSNFWITWVRQAPGKGLEWIGD |
| | IYPGSDNSNYNAPVKGRFTISRDDSKNTLYLQMNSLKTEDTAVYYCAREA |
| | YYTNPGFAYWGQGTLVTVSS (SEQ ID NO: 1289) |
| 4F11V4-39 | QLQLQESGPGLVKPSETLSLTCTVSGYPFSNFWITWIRQPPGKGLEWIGDIY |
| | PGSDNSNYNPSLKSRVTISVDTSKNQFSLKLSSVTAADTAVYYCAREAYY |
| | TNPGFAYWGQGTLVTVSS (SEQ ID NO: 1290) |

Antibody 6H6

| | |
|---|---|
| 6H6V3-15 | EVQLVESGGGLVKPGGSLRLSCAASGFTFSDAWMDWVRQAPGKGLEWW |
| | VAEIRNKVNNHATYYAPVKGRFTISRDDSKNTLYLQMNSLKTEDTAVYY |
| | CCTSLYDGYYLRFAWGQGTLVTVSS (SEQ ID NO: 1302) |
| 6H6V3-7 | EVQLVESGGGLVQPGGSLRLSCAASGFTFSDAWMDWVRQAPGKGLEWW |
| | VAEIRNKVNNHATYYDSVKGRFTISRDNAKNSLYLQMNSLRAEDTAVYY |
| | CCTSLYDGYYLRFAWGQGTLVTVSS (SEQ ID NO: 1303) |
| 6H6V3-23 | EVQLLESGGGLVQPGGSLRLSCAASGFTFSDAWMDWVRQAPGKGLEWW |
| | VAEIRNKVNNHATYYDSVKGRFTISRDNSKNTLYLQMNSLRAEDTAVYY |
| | CCTSLYDGYYLRFAWGQGTLVTVSS (SEQ ID NO: 1304) |
| 6H6V3-48 | EVQLVESGGGLVQPGGSLRLSCAASGFTFSDAWMDWVRQAPGKGLEWW |
| | VAEIRNKVNNHATYYDSVKGRFTISRDNAKNSLYLQMNSLRAEDTAVYY |
| | CCTSLYDGYYLRFAWGQGTLVTVSS (SEQ ID NO: 1303) |
| 6H6V3-30 | QVQLVESGGGVVQPGRSLRLSCAASGFTFSDAWMDWVRQAPGKGLEWW |
| | VAEIRNKVNNHATYYDSVKGRFTISRDNSKNTLYLQMNSLRAEDTAVYY |
| | CCTSLYDGYYLRFAWGQGTLVTVSS (SEQ ID NO: 1305) |
| 6H6V1-46 | QVQLVQSGAEVKKPGASVKVSCKASGFTFSDAWMDWVRQAPGQGLEW |
| | WVAEIRNKVNNHATYYQKFQGRVTMTRDTSTSTVYMELSSLRSEDTAVY |
| | YCCTSLYDGYYLRFAWGQGTLVTVSS (SEQ ID NO: 1306) |
| 6H6V 1-69 | QVQLVQSGAEVKKPGSSVKVSCKASGFTFSDAWMDWVRQAPGQGLEW |
| | WVAEIRNKVNNHATYYQKFQGRVTITADESTSTAYMELSSLRSEDTAVYY |
| | CCTSLYDGYYLRFAWGQGTLVTVSS (SEQ ID NO: 1307) |
| 6H6V5-51 | EVQLVQSGAEVKKPGESLKISCKGSGFTFSDAWMDWVRQMPGKGLEWW |
| | VAEIRNKVNNHATYYPSFQGQVTISADKSISTAYLQWSSLKASDTAMYYC |
| | CTSLYDGYYLRFAWGQGTLVTVSS (SEQ ID NO: 1308) |
| 6H6V4-59 | QVQLQESGPGLVKPSETLSLTCTVSGFTFSDAWMDWIRQPPGKGLEWWV |
| | AEIRNKVNNHATYYPSLKSRVTISVDTSKNQFSLKLSSVTAADTAVYYCCT |
| | SLYDGYYLRFAWGQGTLVTVSS (SEQ ID NO: 1309) |
| 6H6V4-39 | QLQLQESGPGLVKPSETLSLTCTVSGFTFSDAWMDWIRQPPGKGLEWWV |
| | AEIRNKVNNHATYYPSLKSRVTISVDTSKNQFSLKLSSVTAADTAVYYCCT |
| | SLYDGYYLRFAWGQGTLVTVSS (SEQ ID NO: 1310) |

Antibody7A9

| | |
|---|---|
| 7A9V3-15 | EVQLVESGGGLVKPGGSLRLSCAASGFTFNTYSMNWVRQAPGKGLEWVA |
| | HIKTKZNNFATFYAAPVKGRFTISRDDSKNTLYLQMNSLKTEDTAVYYCV |
| | ZHZSNNYPFAYWGQGTLVTVSS (SEQ ID NO: 1312) |
| 7A9V3-48 | EVQLVESGGGLVQPGGSLRLSCAASGFTFNTYSMNWVRQAPGKGLEWVA |
| | HIKTKZNNFATFYADSVKGRFTISRDNAKNSLYLQMNSLRAEDTAVYYCV |
| | ZHZSNNYPFAYWGQGTLVTVSS (SEQ ID NO: 1313) |
| 7A9V3-23 | EVQLLESGGGLVQPGGSLRLSCAASGFTFNTYSMNWVRQAPGKGLEWVA |
| | HIKTKZNNFATFYADSVKGRFTISRDNSKNTLYLQMNSLRAEDTAVYYCV |
| | ZHZSNNYPFAYWGQGTLVTVSS (SEQ ID NO: 1314) |
| 7A9V3-7 | EVQLVESGGGLVQPGGSLRLSCAASGFTFNTYSMNWVRQAPGKGLEWVA |
| | HIKTKZNNFATFYADSVKGRFTISRDNAKNSLYLQMNSLRAEDTAVYYCV |
| | ZHZSNNYPFAYWGQGTLVTVSS (SEQ ID NO: 1313) |
| 7A9V3-30 | QVQLVESGGGVVQPGRSLRLSCAASGFTFNTYSMNWVRQAPGKGLEWV |
| | AHIKTKZNNFATFYADSVKGRFTISRDNSKNTLYLQMNSLRAEDTAVYYC |
| | VZHZSNNYPFAYWGQGTLVTVSS (SEQ ID NO: 1315) |
| 7A9V1-46 | QVQLVQSGAEVKKPGASVKVSCKASGFTFNTYSMNWVRQAPGQGLEWV |
| | AHIKTKZNNFATFYAQKFQGRVTMTRDTSTSTVYMELSSLRSEDTAVYYC |
| | VZHZSNNYPFAYWGQGTLVTVSS (SEQ ID NO: 1316) |
| 7A9V1-69 | QVQLVQSGAEVKKPGSSVKVSCKASGFTFNTYSMNWVRQAPGQGLEWV |
| | AHIKTKZNNFATFYAQKFQGRVTITADESTSTAYMELSSLRSEDTAVYYCV |
| | ZHZSNNYPFAYWGQGTLVTVSS (SEQ ID NO: 1317) |
| 7A9V5-51 | EVQLVQSGAEVKKPGESLKISCKGSGFTFNTYSMNWVRQMPGKGLEWVA |
| | HIKTKZNNFATFYAPSFQGQVTISADKSISTAYLQWSSLKASDTAMYYCVZ |
| | HZSNNYPFAYWGQGTLVTVSS (SEQ ID NO: 1318) |
| 7A9V4-59 | QVQLQESGPGLVKPSETLSLTCTVSGFTFNTYSMNWIRQPPGKGLEWVAHI |
| | KTKZNNFATFYAPSLKSRVTISVDTSKNQFSLKLSSVTAADTAVYYCVZHZ |
| | SNNYPFAYWGQGTLVTVSS (SEQ ID NO: 1319) |
| 7A9V4-30-4 | QVQLQESGPGLVKPSQTLSLTCTVSGFTFNTYSMNWIRQPPGKGLEWVAH |
| | IKTKZNNFATFYAPSLKSRVTISVDTSKNQFSLKLSSVTAADTAVYYCVZH |
| | ZSNNYPFAYWGQGTLVTVSS (SEQ ID NO: 1320) |

Antibody 7B3

| | |
|---|---|
| 7B3V1-46 | QVQLVQSGAEVKKPGASVKVSCKASGYTFTTYWIHWVRQAPGQGLEWIG |
| | RNDPNSGGSNYNQKFQGRVTMTRDTSTSTVYMELSSLRSEDTAVYYCVR |
| | TNWDGDFWGQGTLVTVSS (SEQ ID NO: 1322) |
| 7B3V5-51 | EVQLVQSGAEVKKPGESLKISCKGSGYTFTTYWIHWVRQMPGKGLEWIG |
| | RNDPNSGGSNYNPSFQGQVTISADKSISTAYLQWSSLKASDTAMYYCVRT |
| | NWDGDFWGQGTLVTVSS (SEQ ID NO: 1323) |
| 7B3V1-69 | QVQLVQSGAEVKKPGSSVKVSCKASGYTFTTYWIHWVRQAPGQGLEWIG |
| | RNDPNSGGSNYNQKFQGRVTITADESTSTAYMELSSLRSEDTAVYYCVRT |
| | NWDGDFWGQGTLVTVSS (SEQ ID NO: 1324) |
| 7B3V3-23 | EVQLLESGGGLVQPGGSLRLSCAASGYTFTTYWIHWVRQAPGKGLEWIG |
| | RNDPNSGGSNYNDSVKGRFTISRDNSKNTLYLQMNSLRAEDTAVYYCVR |
| | TNWDGDFWGQGTLVTVSS (SEQ ID NO: 1325) |
| 7B3V3-7 | EVQLVESGGGLVQPGGSLRLSCAASGYTFTTYWIHWVRQAPGKGLEWIG |
| | RNDPNSGGSNYNDSVKGRFTISRDNAKNSLYLQMNSLRAEDTAVYYCVR |
| | TNWDGDFWGQGTLVTVSS (SEQ ID NO: 1326) |
| 7B3V3 -30 | QVQLVESGGGVVQPGRSLRLSCAASGYTFTTYWIHWVRQAPGKGLEWIG |
| | RNDPNSGGSNYNDSVKGRFTISRDNSKNTLYLQMNSLRAEDTAVYYCVR |
| | TNWDGDFWGQGTLVTVSS (SEQ ID NO: 1327) |
| 7B3V3-48 | EVQLVESGGGLVQPGGSLRLSCAASGYTFTTYWIHWVRQAPGKGLEWIG |
| | RNDPNSGGSNYNDSVKGRFTISRDNAKNSLYLQMNSLRAEDTAVYYCVR |
| | TNWDGDFWGQGTLVTVSS (SEQ ID NO: 1326) |
| 7B3V4-59 | QVQLQESGPGLVKPSETLSLTCTVSGYTFTTYWIHWIRQPPGKGLEWIGRN |
| | DPNSGGSNYNPSLKSRVTISVDTSKNQFSLKLSSVTAADTAVYYCVRTNW |
| | DGDFWGQGTLVTVSS (SEQ ID NO: 1328) |
| 7B3V3-15 | EVQLVESGGGLVKPGGSLRLSCAASGYTFTTYWIHWVRQAPGKGLE |
| | WIGRNDPNSGGSNYNAPVKGRFTISRDDSKNTLYLQMNSLKTEDTAV |
| | YYCVRTNWDGDFWGQGTLVTVSS (SEQ ID NO: 1329) |
| 7B3V4-30-4 | QVQLQESGPGLVKPSQTLSLTCTVSGYTFTTYWIHWIRQPPGKGLEWI |
| | GRNDPNSGGSNYNPSLKSRVTISVDTSKNQFSLKLSSVTAADTAVYYC |
| | VRTNWDGDFWGQGTLVTVSS (SEQ ID NO: 1330) |

Antibody 8A1

| | |
|---|---|
| 8A1V5-51 | EVQLVQSGAEVKKPGESLKISCKGSGYAFSNYWMSWVRQMPGKGLE |
| | WIGQIYPGDGDTKYNPSFQGQVTISADKSISTAYLQWSSLKASDTAM |
| | YYCSREKGADYYGSTYSAWFSYWGQGTLVTVSS (SEQ ID NO: 1332) |
| 8A1V1-46 | QVQLVQSGAEVKKPGASVKVSCKASGYAFSNYWMSWVRQAPGQG |
| | LEWIGQIYPGDGDTKYNQKFQGRVTMTRDTSTSTVYMELSSLRSEDT |
| | AVYYCSREKGADYYGSTYSAWFSYWGQGTLVTVSS (SEQ ID NO: 1333) |
| 8A1V3-23 | EVQLLESGGGLVQPGGSLRLSCAASGYAFSNYWMSWVRQAPGKGLE |
| | WIGQIYPGDGDTKYNDSVKGRFTISRDNSKNTLYLQMNSLRAEDTAV |
| | YYCSREKGADYYGSTYSAWFSYWGQGTLVTVSS (SEQ ID NO: 1334) |
| 8A1V1-69 | QVQLVQSGAEVKKPGSSVKVSCKASGYAFSNYWMSWVRQAPGQGL |
| | EWIGQIYPGDGDTKYNQKFQGRVTITADESTSTAYMELSSLRSEDTAV |
| | YYCSREKGADYYGSTYSAWFSYWGQGTLVTVSS (SEQ ID NO: 1335) |
| 8A1V3-7 | EVQLVESGGGLVQPGGSLRLSCAASGYAFSNYWMSWVRQAPGKGLE |
| | WIGQIYPGDGDTKYNDSVKGRFTISRDNAKNSLYLQMNSLRAEDTAV |
| | YYCSREKGADYYGSTYSAWFSYWGQGTLVTVSS (SEQ ID NO: 1336) |
| 8A1V3-48 | EVQLVESGGGLVQPGGSLRLSCAASGYAFSNYWMSWVRQAPGKGLE |
| | WIGQIYPGDGDTKYNDSVKGRFTISRDNAKNSLYLQMNSLRAEDTAV |
| | YYCSREKGADYYGSTYSAWFSYWGQGTLVTVSS (SEQ ID NO: 1336) |
| 8A1V3-30 | QVQLVESGGGVVQPGRSLRLSCAASGYAFSNYWMSWVRQAPGKGL |
| | EWIGQIYPGDGDTKYNDSVKGRFTISRDNSKNTLYLQMNSLRAEDTA |
| | VYYCSREKGADYYGSTYSAWFSYWGQGTLVTVSS (SEQ ID NO: 1337) |
| 8A1V4-59 | QVQLQESGPGLVKPSETLSLTCTVSGYAFSNYWMSWIRQPPGKGLE |
| | WIGQIYPGDGDTKYNPSLKSRVTISVDTSKNQFSLKLSSVTAADTAVY |
| | YCSREKGADYYGSTYSAWFSYWGQGTLVTVSS (SEQ ID NO: 1338) |
| 8A1V3-15 | EVQLVESGGGLVKPGGSLRLSCAASGYAFSNYWMSWVRQAPGKGLE |
| | WIGQIYPGDGDTKYNAPVKGRFTISRDDSKNTLYLQMNSLKTEDTAV |
| | YYCSREKGADYYGSTYSAWFSYWGQGTLVTVSS (SEQ ID NO: 1339) |
| 8A1V4-30-4 | QVQLQESGPGLVKPSQTLSLTCTVSGYAFSNYWMSWIRQPPGKGLE |
| | WIGQIYPGDGDTKYNPSLKSRVTISVDTSKNQFSLKLSSVTAADTAVY |
| | YCSREKGADYYGSTYSAWFSYWGQGTLVTVSS (SEQ ID NO: 1340) |

Antibody 9F5

| | |
|---|---|
| 9F5V5-51 | EVQLVQSGAEVKKPGESLKISCKGSGYAFSSSWMNWVRQMPGKGLE |
| | WIGRIYPGDGDTNYNPSFQGQVTISADKSISTAYLQWSSLKASDTAM |
| | YYCARLLRNQPGESYAMDYWGQGTLVTVSS (SEQ ID NO: 1342) |
| 9F5V1-46 | QVQLVQSGAEVKKPGASVKVSCKASGYAFSSSWMNWVRQAPGQGL |
| | EWIGRIYPGDGDTNYNQKFQGRVTMTRDTSTSTVYMELSSLRSEDTA |
| | VYYCARLLRNQPGESYAMDYWGQGTLVTVSS (SEQ ID NO: 1343) |
| 9F5V1-69 | QVQLVQSGAEVKKPGSSVKVSCKASGYAFSSSWMNWVRQAPGQGL |
| | EWIGRIYPGDGDTNYNQKFQGRVTITADESTSTAYMELSSLRSEDTAV |
| | YYCARLLRNQPGESYAMDYWGQGTLVTVSS (SEQ ID NO: 1344) |
| 9F5V3 -23 | EVQLLESGGGLVQPGGSLRLSCAASGYAFSSSWMNWVRQAPGKGLE |
| | WIGRIYPGDGDTNYNDSVKGRFTISRDNSKNTLYLQMNSLRAEDTAV |
| | YYCARLLRNQPGESYAMDYWGQGTLVTVSS (SEQ ID NO: 1345) |
| 9F5V3-7 | EVQLVESGGGLVQPGGSLRLSCAASGYAFSSSWMNWVRQAPGKGLE |
| | WIGRIYPGDGDTNYNDSVKGRFTISRDNAKNSLYLQMNSLRAEDTAV |
| | YYCARLLRNQPGESYAMDYWGQGTLVTVSS (SEQ ID NO: 1346) |
| 9F5V3-48 | EVQLVESGGGLVQPGGSLRLSCAASGYAFSSSWMNWVRQAPGKGLE |
| | WIGRIYPGDGDTNYNDSVKGRFTISRDNAKNSLYLQMNSLRAEDTAV |
| | YYCARLLRNQPGESYAMDYWGQGTLVTVSS (SEQ ID NO: 1346) |
| 9F5V3-30 | QVQLVESGGGVVQPGRSLRLSCAASGYAFSSSWMNWVRQAPGKGLE |
| | WIGRIYPGDGDTNYNDSVKGRFTISRDNSKNTLYLQMNSLRAEDTAV |
| | YYCARLLRNQPGESYAMDYWGQGTLVTVSS (SEQ ID NO: 1347) |
| 9F5V4-59 | QVQLQESGPGLVKPSETLSLTCTVSGYAFSSSWMNWIRQPPGKGLE |
| | WIGRIYPGDGDTNYNPSLKSRVTISVDTSKNQFSLKLSSVTAADTAVY |
| | YCARLLRNQPGESYAMDYWGQGTLVTVSS (SEQ ID NO: 1348) |
| 9F5V3-15 | EVQLVESGGGLVKPGGSLRLSCAASGYAFSSSWMNWVRQAPGKGLE |
| | WIGRIYPGDGDTNYNAPVKGRFTISRDDSKNTLYLQMNSLKTEDTAV |
| | YYCARLLRNQPGESYAMDYWGQGTLVTVSS (SEQ ID NO: 1349) |
| 9F5V4-30-4 | QVQLQESGPGLVKPSQTLSLTCTVSGYAFSSSWMNWIRQPPGKGLE |
| | WIGRIYPGDGDTNYNPSLKSRVTISVDTSKNQFSLKLSSVTAADTAVY |
| | YCARLLRNQPGESYAMDYWGQGTLVTVSS (SEQ ID NO: 1350) |
| 9F5-H1 | QVQLVQSGAEVKKPGASVKVSCKASGYAFSSSWMNWVRQAPGQGL |
| | EWMGRIYPGDGDTNYAQKFQGRVTMTRDTSTSTVYMELSSLRSEDT |
| | AVYYCARLLRNQPGESYAMDYWGQGTLVTVSS (SEQ ID NO: 1665) |
| 9F5-H2 | QVQLVQSGAEVKKPGASVKVSCKASGYAFSSSWMNWVRQAPGQGL |
| | EWIGRIYPGDGDTNYAQKFQGRVTMTADTSTSTVYMELSSLRSEDTA |
| | VYYCARLLRNQPGESYAMDYWGQGTLVTVSS (SEQ ID NO: 1666) |
| 9F5-H3 | QVQLVQSGAEVKKPGASLKISCKASGYAFSSSWMNWVRQAPGQGLE |
| | WIGRIYPGDGDTNYAQKFQGRATLTADTSTSTAYMELSSLRSEDTAV |
| | YYCARLLRNQPGESYAMDYWGQGALVTVSS (SEQ ID NO: 1667) |

Antibody 9G1

| | |
|---|---|
| 9G1V5-51 | EVQLVQSGAEVKKPGESLKISCKGSGYIFTTYWIHWVRQMPGKGLE |
| | WIGRIDPNNGDTNYNPSFQGQVTISADKSISTAYLQWSSLKASDTAM |
| | YYCVMTGTDFDYWGQGTLVTVSS (SEQ ID NO: 1352) |
| 9G1V1-46 | QVQLVQSGAEVKKPGASVKVSCKASGYIFTTYWIHWVRQAPGQGLE |
| | WIGRIDPNNGDTNYNQKFQGRVTMTRDTSTSTVYMELSSLRSEDTA |
| | VYYCVMTGTDFDYWGQGTLVTVSS (SEQ ID NO: 1353) |
| 9G1V1-69 | QVQLVQSGAEVKKPGSSVKVSCKASGYIFTTYWIHWVRQAPGQGLE |
| | WIGRIDPNNGDTNYNQKFQGRVTITADESTSTAYMELSSLRSEDTAV |
| | YYCVMTGTDFDYWGQGTLVTVSS (SEQ ID NO: 1354) |
| 9G1V3-23 | EVQLLESGGGLVQPGGSLRLSCAASGYIFTTYWIHWVRQAPGKGLEW |
| | IGRIDPNNGDTNYNDSVKGRFTISRDNSKNTLYLQMNSLRAEDTAVY |
| | YCVMTGTDFDYWGQGTLVTVSS (SEQ ID NO: 1355) |
| 9G1V3-30 | QVQLVESGGGVVQPGRSLRLSCAASGYIFTTYWIHWVRQAPGKGLE |
| | WIGRIDPNNGDTNYNDSVKGRFTISRDNSKNTLYLQMNSLRAEDTA |
| | VYYCVMTGTDFDYWGQGTLVTVSS (SEQ ID NO: 1356) |
| 9G1V3-7 | EVQLVESGGGLVQPGGSLRLSCAASGYIFTTYWIHWVRQAPGKGLE |
| | WIGRIDPNNGDTNYNDSVKGRFTISRDNAKNSLYLQMNSLRAEDTAV |
| | YYCVMTGTDFDYWGQGTLVTVSS (SEQ ID NO: 1357) |
| 9G1V3-48 | EVQLVESGGGLVQPGGSLRLSCAASGYIFTTYWIHWVRQAPGKGLE |
| | WIGRIDPNNGDTNYNDSVKGRFTISRDNAKNSLYLQMNSLRAEDTAV |
| | YYCVMTGTDFDYWGQGTLVTVSS (SEQ ID NO: 1357) |
| 9G1V4-59 | QVQLQESGPGLVKPSETLSLTCTVSGYIFTTYWIHWIRQPPGKGLEWI |
| | GRIDPNNGDTNYNPSLKSRVTISVDTSKNQFSLKLSSVTAADTAVYY |
| | CVMTGTDFDYWGQGTLVTVSS (SEQ ID NO: 1358) |
| 9G1V3-15 | EVQLVESGGGLVKPGGSLRLSCAASGYIFTTYWIHWVRQAPGKGLE |
| | WIGRIDPNNGDTNYNAPVKGRFTISRDDSKNTLYLQMNSLKTEDTAV |
| | YYCVMTGTDFDYWGQGTLVTVSS (SEQ ID NO: 1359) |
| 9G1V4-30-4 | QVQLQESGPGLVKPSQTLSLTCTVSGYIFTTYWIHWIRQPPGKGLEWI |
| | GRIDPNNGDTNYNPSLKSRVTISVDTSKNQFSLKLSSVTAADTAVYY |
| | CVMTGTDFDYWGQGTLVTVSS (SEQ ID NO: 1360) |

Antibody 9G3

| | |
|---|---|
| 9G3V3 -15 | EVQLVESGGGLVKPGGSLRLSCAASGFNFNTYAMKWVRQAPGKGLE |
| | WIARIRSNSNDYATNYSAPVKGRFTISRDDSKNTLYLQMNSLKTEDTA |
| | VYYCVGHKINNYPFAHWGQGTLVTVSS (SEQ ID NO: 1456) |
| 9G3V3-23 | EVQLLESGGGLVQPGGSLRLSCAASGFNFNTYAMKWVRQAPGKGLE |
| | WIARIRSNSNDYATNYSDSVKGRFTISRDNSKNTLYLQMNSLRAEDT |
| | AVYYCVGHKINNYPFAHWGQGTLVTVSS (SEQ ID NO: 1457) |
| 9G3V3-30 | QVQLVESGGGVVQPGRSLRLSCAASGFNFNTYAMKWVRQAPGKGLE |
| | WIARIRSNSNDYATNYSDSVKGRFTISRDNSKNTLYLQMNSLRAEDTAV |
| | YYCVGHKINNYPFAHWGQGTLVTVSS (SEQ ID NO: 1458) |
| 9G3V3-48 | EVQLVESGGGLVQPGGSLRLSCAASGFNFNTYAMKWVRQAPGKGLE |
| | WIARIRSNSNDYATNYSDSVKGRFTISRDNAKNSLYLQMNSLRAEDT |
| | AVYYCVGHKINNYPFAHWGQGTLVTVSS (SEQ ID NO: 1459) |
| 9G3V3-7 | EVQLVESGGGLVQPGGSLRLSCAASGFNFNTYAMKWVRQAPGKGLE |
| | WIARIRSNSNDYATNYSDSVKGRFTISRDNAKNSLYLQMNSLRAEDT |
| | AVYYCVGHKINNYPFAHWGQGTLVTVSS (SEQ ID NO: 1460) |
| 9G3V1-69 | QVQLVQSGAEVKKPGSSVKVSCKASGFNFNTYAMKWVRQAPGQGL |
| | EWIARIRSNSNDYATNYSQKFQGRVTITADESTSTAYMELSSLRSEDT |
| | AVYYCVGHKINNYPFAHWGQGTLVTVSS (SEQ ID NO: 1461) |
| 9G3V1-46 | QVQLVQSGAEVKKPGASVKVSCKASGFNFNTYAMKWVRQAPGQGL |
| | EWIARIRSNSNDYATNYSQKFQGRVTMTRDTSTSTVYMELSSLRSEDT |
| | AVYYCVGHKINNYPFAHWGQGTLVTVSS (SEQ ID NO: 1462) |
| 9G3V5-51 | EVQLVQSGAEVKKPGESLKISCKGSGFNFNTYAMKWVRQMPGKGL |
| | EWIARIRSNSNDYATNYSPSFQGQVTISADKSISTAYLQWSSLKASDT |
| | AMYYCVGHKINNYPFAHWGQGTLVTVSS (SEQ ID NO: 1463) |
| 9G3V4-59 | QVQLQESGPGLVKPSETLSLTCTVSGFNFNTYAMKWIRQPPGKGLEWI |
| | ARIRSNSNDYATNYSPSLKSRVTISVDTSKNQFSLKLSSVTAADTAVYY |
| | CVGHKINNYPFAHWGQGTLVTVSS (SEQ ID NO: 1464) |
| 9G3V4-30-4 | QVQLQESGPGLVKPSQTLSLTCTVSGFNFNTYAMKWIRQPPGKGLEWI |
| | ARIRSNSNDYATNYSPSLKSRVTISVDTSKNQFSLKLSSVTAADTAVYY |
| | CVGHKINNYPFAHWGQGTLVTVSS (SEQ ID NO: 1465) |

Antibody10A9

| | |
|---|---|
| 10A9V5-51 | EVQLVQSGAEVKKPGESLKISCKGSGYPFSNFWITWVRQMPGKGLE |
| | WIGDIYPGSDNRNFNPSFQGQVTISADKSISTAYLQWSSLKASDTAMY |
| | YCAREAYYTNPGFAYWGQGTLVTVSS (SEQ ID NO: 1362) |
| 10A9V1-69 | QVQLVQSGAEVKKPGSSVKVSCKASGYPFSNFWITWVRQAPGQGLE |
| | WIGDIYPGSDNRNFNQKFQGRVTITADESTSTAYMELSSLRSEDTAVY |
| | YCAREAYYTNPGFAYWGQGTLVTVSS (SEQ ID NO: 1363) |
| 10A9V1-46 | QVQLVQSGAEVKKPGASVKVSCKASGYPFSNFWITWVRQAPGQGLE |
| | WIGDIYPGSDNRNFNQKFQGRVTMTRDTSTSTVYMELSSLRSEDTAV |
| | YYCAREAYYTNPGFAYWGQGTLVTVSS (SEQ ID NO: 1364) |
| 10A9V3-48 | EVQLVESGGGLVQPGGSLRLSCAASGYPFSNFWITWVRQAPGKGLE |
| | WIGDIYPGSDNRNFNDSVKGRFTISRDNAKNSLYLQMNSLRAEDTAV |
| | YYCAREAYYTNPGFAYWGQGTLVTVSS (SEQ ID NO: 1365) |
| 10A9V3-7 | EVQLVESGGGLVQPGGSLRLSCAASGYPFSNFWITWVRQAPGKGLE |
| | WIGDIYPGSDNRNFNDSVKGRFTISRDNAKNSLYLQMNSLRAEDTAV |
| | YYCAREAYYTNPGFAYWGQGTLVTVSS (SEQ ID NO: 1365) |
| 10A9V3-30 | QVQLVESGGGVVQPGRSLRLSCAASGYPFSNFWITWVRQAPGKGLE |
| | WIGDIYPGSDNRNFNDSVKGRFTISRDNSKNTLYLQMNSLRAEDTAV |
| | YYCAREAYYTNPGFAYWGQGTLVTVSS (SEQ ID NO: 1366) |
| 10A9V3-23 | EVQLLESGGGLVQPGGSLRLSCAASGYPFSNFWITWVRQAPGKGLE |
| | WIGDIYPGSDNRNFNDSVKGRFTISRDNSKNTLYLQMNSLRAEDTAV |
| | YYCAREAYYTNPGFAYWGQGTLVTVSS (SEQ ID NO: 1367) |
| 10A9V4-59 | QVQLQESGPGLVKPSETLSLTCTVSGYPFSNFWITWIRQPPGKGLEWI |
| | GDIYPGSDNRNFNPSLKSRVTISVDTSKNQFSLKLSSVTAADTAVYYC |
| | AREAYYTNPGFAYWGQGTLVTVSS (SEQ ID NO: 1368) |
| 10A9V3-15 | EVQLVESGGGLVKPGGSLRLSCAASGYPFSNFWITWVRQAPGKGLE |
| | WIGDIYPGSDNRNFNAPVKGRFTISRDDSKNTLYLQMNSLKTEDTAV |
| | YYCAREAYYTNPGFAYWGQGTLVTVSS (SEQ ID NO: 1369) |
| 10A9V4-39 | QLQLQESGPGLVKPSETLSLTCTVSGYPFSNFWITWIRQPPGKGLEWI |
| | GDIYPGSDNRNFNPSLKSRVTISVDTSKNQFSLKLSSVTAADTAVYYC |
| | AREAYYTNPGFAYWGQGTLVTVSS (SEQ ID NO: 1370) |

Antibody11A8

| | |
|---|---|
| 11A8V3-15 | EVQLVESGGGLVKPGGSLRLSCAASGFNFNTYAMNWVRQAPGKGLE |
| | WVARIRSKSNNYATYYAAPVKGRFTISRDDSKNTLYLQMNSLKTEDT |
| | AVYYCVRHYSNYGWGFAYWGQGTLVTVSS (SEQ ID NO: 1372) |
| 11A8V3-48 | EVQLVESGGGLVQPGGSLRLSCAASGFNFNTYAMNWVRQAPGKGLE |
| | WVARIRSKSNNYATYYADSVKGRFTISRDNAKNSLYLQMNSLRAED |
| | TAVYYCVRHYSNYGWGFAYWGQGTLVTVSS (SEQ ID NO: 1373) |
| 11A8V3-23 | EVQLLESGGGLVQPGGSLRLSCAASGFNFNTYAMNWVRQAPGKGLE |
| | WVARIRSKSNNYATYYADSVKGRFTISRDNSKNTLYLQMNSLRAEDT |
| | AVYYCVRHYSNYGWGFAYWGQGTLVTVSS (SEQ ID NO: 1374) |
| 11A8V3-30 | QVQLVESGGGVVQPGRSLRLSCAASGFNFNTYAMNWVRQAPGKGL |
| | EWVARIRSKSNNYATYYADSVKGRFTISRDNSKNTLYLQMNSLRAED |
| | TAVYYCVRHYSNYGWGFAYWGQGTLVTVSS (SEQ ID NO: 1375) |
| 11A8V3-7 | EVQLVESGGGLVQPGGSLRLSCAASGFNFNTYAMNWVRQAPGKGLE |
| | WVARIRSKSNNYATYYADSVKGRFTISRDNAKNSLYLQMNSLRAED |
| | TAVYYCVRHYSNYGWGFAYWGQGTLVTVSS (SEQ ID NO: 1373) |
| 11A8V1-69 | QVQLVQSGAEVKKPGSSVKVSCKASGFNFNTYAMNWVRQAPGQGL |
| | EWVARIRSKSNNYATYYAQKFQGRVTITADESTSTAYMELSSLRSED |
| | TAVYYCVRHYSNYGWGFAYWGQGTLVTVSS (SEQ ID NO: 1376) |
| 11A8V1-46 | QVQLVQSGAEVKKPGASVKVSCKASGFNFNTYAMNWVRQAPGQGL |
| | EWVARIRSKSNNYATYYAQKFQGRVTMTRDTSTSTVYMELSSLRSE |
| | DTAVYYCVRHYSNYGWGFAYWGQGTLVTVSS (SEQ ID NO: 1377) |
| 11A8V5-51 | EVQLVQSGAEVKKPGESLKISCKGSGFNFNTYAMNWVRQMPGKGLE |
| | WVARIRSKSNNYATYYAPSFQGQVTISADKSISTAYLQWSSLKASDT |
| | AMYYCVRHYSNYGWGFAYWGQGTLVTVSS (SEQ ID NO: 1378) |
| 11A8V4-59 | QVQLQESGPGLVKPSETLSLTCTVSGFNFNTYAMNWIRQPPGKGLEW |
| | VARIRSKSNNYATYYAPSLKSRVTISVDTSKNQFSLKLSSVTAADTAV |
| | YYCVRHYSNYGWGFAYWGQGTLVTVSS (SEQ ID NO: 1379) |
| 11A8V4-39 | QLQLQESGPGLVKPSETLSLTCTVSGFNFNTYAMNWIRQPPGKGLEW |
| | VARIRSKSNNYATYYAPSLKSRVTISVDTSKNQFSLKLSSVTAADTAV |
| | YYCVRHYSNYGWGFAYWGQGTLVTVSS (SEQ ID NO: 1380) |

Antibody12D9

| | |
|---|---|
| 12D9V1-46 | QVQLVQSGAEVKKPGASVKVSCKASGYTFSDYYIHWVRQAPGQGLE |
| | WIGYIYPNNGDNGYNQKFQGRVTMTRDTSTSTVYMELSSLRSEDTA |
| | VYYCARRGYYGGSYDYWGQGTLVTVSS (SEQ ID NO: 1382) |
| 12D9V5-51 | EVQLVQSGAEVKKPGESLKISCKGSGYTFSDYYIHWVRQMPGKGLE |
| | WIGYIYPNNGDNGYNPSFQGQVTISADKSISTAYLQWSSLKASDTAM |
| | YYCARRGYYGGSYDYWGQGTLVTVSS (SEQ ID NO: 1383) |
| 12D9V1-69 | QVQLVQSGAEVKKPGSSVKVSCKASGYTFSDYYIHWVRQAPGQGLE |
| | WIGYIYPNNGDNGYNQKFQGRVTITADESTSTAYMELSSLRSEDTAV |
| | YYCARRGYYGGSYDYWGQGTLVTVSS (SEQ ID NO: 1384) |
| 12D9V3-48 | EVQLVESGGGLVQPGGSLRLSCAASGYTFSDYYIHWVRQAPGKGLE |
| | WIGYIYPNNGDNGYNDSVKGRFTISRDNAKNSLYLQMNSLRAEDTA |
| | VYYCARRGYYGGSYDYWGQGTLVTVSS (SEQ ID NO: 1385) |
| 12D9V3-30 | QVQLVESGGGVVQPGRSLRLSCAASGYTFSDYYIHWVRQAPGKGLE |
| | WIGYIYPNNGDNGYNDSVKGRFTISRDNSKNTLYLQMNSLRAEDTAV |
| | YYCARRGYYGGSYDYWGQGTLVTVSS (SEQ ID NO: 1386) |
| 12D9V3-23 | EVQLLESGGGLVQPGGSLRLSCAASGYTFSDYYIHWVRQAPGKGLE |
| | WIGYIYPNNGDNGYNDSVKGRFTISRDNSKNTLYLQMNSLRAEDTAV |
| | YYCARRGYYGGSYDYWGQGTLVTVSS (SEQ ID NO: 1387) |
| 12D9V3-7 | EVQLVESGGGLVQPGGSLRLSCAASGYTFSDYYIHWVRQAPGKGLE |
| | WIGYIYPNNGDNGYNDSVKGRFTISRDNAKNSLYLQMNSLRAEDTA |
| | VYYCARRGYYGGSYDYWGQGTLVTVSS (SEQ ID NO: 1385) |
| 12D9V4-59 | QVQLQESGPGLVKPSETLSLTCTVSGYTFSDYYIHWIRQPPGKGLEWI |
| | GYIYPNNGDNGYNPSLKSRVTISVDTSKNQFSLKLSSVTAADTAVYY |
| | CARRGYYGGSYDYWGQGTLVTVSS (SEQ ID NO: 1388) |
| 12D9V3-15 | EVQLVESGGGLVKPGGSLRLSCAASGYTFSDYYIHWVRQAPGKGLE |
| | WIGYIYPNNGDNGYNAPVKGRFTISRDDSKNTLYLQMNSLKTEDTAV |
| | YYCARRGYYGGSYDYWGQGTLVTVSS (SEQ ID NO: 1389) |
| 12D9V4-30-4 | QVQLQESGPGLVKPSQTLSLTCTVSGYTFSDYYTHWIRQPPGKGLEWI |
| | GYIYPNNGDNGYNPSLKSRVTISVDTSKNQFSLKLSSVTAADTAVYY |
| | CARRGYYGGSYDYWGQGTLVTVSS (SEQ ID NO: 1390) |

Antibody 12F9

| | |
|---|---|
| 12F9V3-15 | EVQLVESGGGLVKPGGSLRLSCAASGFRFNTYAMTWVRQAPGKGLE |
| | WEGVIRRKSSNFATLYAAPVKGRFTISRDDSKNTLYLQMNSLKTEDT |
| | AVYYCVRHKSNKYPFVYWGQGTLVTVSS (SEQ ID NO: 1392) |
| 12F9V3-23 | EVQLLESGGGLVQPGGSLRLSCAASGFRFNTYAMTWVRQAPGKGLE |
| | WEGVIRRKSSNFATLYADSVKGRFTISRDNSKNTLYLQMNSLRAEDT |
| | AVYYCVRHKSNKYPFVYWGQGTLVTVSS (SEQ ID NO: 1393) |
| 12F9V3-48 | EVQLVESGGGLVQPGGSLRLSCAASGFRFNTYAMTWVRQAPGKGLE |
| | WEGVIRRKSSNFATLYADSVKGRFTISRDNAKNSLYLQMNSLRAEDT |
| | AVYYCVRHKSNKYPFVYWGQGTLVTVSS (SEQ ID NO: 1394) |
| 12F9V3-30 | QVQLVESGGGVVQPGRSLRLSCAASGFRFNTYAMTWVRQAPGKGLE |
| | WEGVIRRKSSNFATLYADSVKGRFTISRDNSKNTLYLQMNSLRAEDT |
| | AVYYCVRHKSNKYPFVYWGQGTLVTVSS (SEQ ID NO: 1395) |
| 12F9V3-7 | EVQLVESGGGLVQPGGSLRLSCAASGFRFNTYAMTWVRQAPGKGLE |
| | WEGVIRRKSSNFATLYADSVKGRFTISRDNAKNSLYLQMNSLRAEDT |
| | AVYYCVRHKSNKYPFVYWGQGTLVTVSS (SEQ ID NO: 1394) |
| 12F9V1-69 | QVQLVQSGAEVKKPGSSVKVSCKASGFRFNTYAMTWVRQAPGQGL |
| | EWEGVIRRKSSNFATLYAQKFQGRVTITADESTSTAYMELSSLRSEDT |
| | AVYYCVRHKSNKYPFVYWGQGTLVTVSS (SEQ ID NO: 1396) |
| 12F9V1-46 | QVQLVQSGAEVKKPGASVKVSCKASGFRFNTYAMTWVRQAPGQGL |
| | EWEGVIRRKSSNFATLYAQKFQGRVTMTRDTSTSTVYMELSSLRSED |
| | TAVYYCVRHKSNKYPFVYWGQGTLVTVSS (SEQ ID NO: 1397) |
| 12F9V5-51 | EVQLVQSGAEVKKPGESLKISCKGSGFRFNTYAMTWVRQMPGKGLE |
| | WEGVIRRKSSNFATLYAPSFQGQVTISADKSISTAYLQWSSLKASDTA |
| | MYYCVRHKSNKYPFVYWGQGTLVTVSS (SEQ ID NO: 1398) |
| 12F9V4-59 | QVQLQESGPGLVKPSETLSLTCTVSGFRFNTYAMTWIRQPPGKGLEW |
| | EGVIRRKSSNFATLYAPSLKSRVTISVDTSKNQFSLKLSSVTAADTAV |
| | YYCVRHKSNKYPFVYWGQGTLVTVSS (SEQ ID NO: 1399) |
| 12F9V4-39 | QLQLQESGPGLVKPSETLSLTCTVSGFRFNTYAMTWIRQPPGKGLEW |
| | EGVIRRKSSNFATLYAPSLKSRVTISVDTSKNQFSLKLSSVTAADTAV |
| | YYCVRHKSNKYPFVYWGQGTLVTVSS (SEQ ID NO: 1400) |

Antibodyl0C1

| | |
|---|---|
| 10C1V3-15 | EVQLVESGGGLVKPGGSLRLSCAASGFTFSDAWMDWVRQAPGKGLE |
| | WVAEIRNKINNHATYYAAPVKGRFTISRDDSKNTLYLQMNSLKTEDT |
| | AVYYCTSLYDGSYLRFAYWGQGTLVTVSS (SEQ ID NO: 1467) |
| 10C1V3-7 | EVQLVESGGGLVQPGGSLRLSCAASGFTFSDAWMDWVRQAPGKGLE |
| | WVAEIRNKINNHATYYADSVKGRFTISRDNAKNSLYLQMNSLRAEDT |
| | AVYYCTSLYDGSYLRFAYWGQGTLVTVSS (SEQ ID NO: 1468) |
| 10C1V3-23 | EVQLLESGGGLVQPGGSLRLSCAASGFTFSDAWMDWVRQAPGKGLE |
| | WVAEIRNKINNHATYYADSVKGRFTISRDNSKNTLYLQMNSLRAEDT |
| | AVYYCTSLYDGSYLRFAYWGQGTLVTVSS (SEQ ID NO: 1469) |
| 10C1V3-30 | QVQLVESGGGVVQPGRSLRLSCAASGFTFSDAWMDWVRQAPGKGL |
| | EWVAEIRNKINNHATYYADSVKGRFTISRDNSKNTLYLQMNSLRAED |
| | TAVYYCTSLYDGSYLRFAYWGQGTLVTVSS (SEQ ID NO: 1470) |
| 10C1V3-48 | EVQLVESGGGLVQPGGSLRLSCAASGFTFSDAWMDWVRQAPGKGLE |
| | WVAEIRNKINNHATYYADSVKGRFTISRDNAKNSLYLQMNSLRAEDT |
| | AVYYCTSLYDGSYLRFAYWGQGTLVTVSS (SEQ ID NO: 1471) |
| 10C1V1-69 | QVQLVQSGAEVKKPGSSVKVSCKASGFTFSDAWMDWVRQAPGQGL |
| | EWVAEIRNKINNHATYYAQKFQGRVTITADESTSTAYMELSSLRSEDT |
| | AVYYCTSLYDGSYLRFAYWGQGTLVTVSS (SEQ ID NO: 1472) |
| 10C1V1-46 | QVQLVQSGAEVKKPGASVKVSCKASGFTFSDAWMDWVRQAPGQGL |
| | EWVAEIRNKINNHATYYAQKFQGRVTMTRDTSTSTVYMELSSLRSED |
| | TAVYYCTSLYDGSYLRFAYWGQGTLVTVSS (SEQ ID NO: 1473) |
| 10C1V5-51 | EVQLVQSGAEVKKPGESLKISCKGSGFTFSDAWMDWVRQMPGKGLE |
| | WVAEIRNKINNHATYYAPSFQGQVTISADKSISTAYLQWSSLKASDTA |
| | MYYCTSLYDGSYLRFAYWGQGTLVTVSS (SEQ ID NO: 1474) |
| 10C1V4-59 | QVQLQESGPGLVKPSETLSLTCTVSGFTFSDAWMDWIRQPPGKGLEW |
| | VAEIRNKINNHATYYAPSLKSRVTISVDTSKNQFSLKLSSVTAADTAV |
| | YYCTSLYDGSYLRFAYWGQGTLVTVSS (SEQ ID NO: 1475) |
| 10C1V4-30-4 | QVQLQESGPGLVKPSQTLSLTCTVSGFTFSDAWMDWIRQPPGKGLEW |
| | VAEIRNKINNHATYYAPSLKSRVTISVDTSKNQFSLKLSSVTAADTAV |
| | YYCTSLYDGSYLRFAYWGQGTLVTVSS (SEQ ID NO: 1476) |

Antibody 7E9

| | |
|---|---|
| 7E9V1-46 | QVQLVQSGAEVKKPGASVKVSCKASGYTFTEYTMIHWVRQAPGQGL |
| | EWIGGINPNNGGTSYKQKFQGRVTMTRDTSTSTVYMELSSLRSEDTA |
| | VYYCARGGSHYYAMDYWGQGTLVTVSS (SEQ ID NO: 1478) |
| 7E9V1-69 | QVQLVQSGAEVKKPGSSVKVSCKASGYTFTEYTMIHWVRQAPGQGL |
| | EWIGGINPNNGGTSYKQKFQGRVTITADESTSTAYMELSSLRSEDTAV |
| | YYCARGGSHYYAMDYWGQGTLVTVSS (SEQ ID NO: 1479) |
| 7E9V5-51 | EVQLVQSGAEVKKPGESLKISCKGSGYTFTEYTMIHWVRQMPGKGLE |
| | WIGGINPNNGGTSYKPSFQGQVTISADKSISTAYLQWSSLKASDTAMY |
| | YCARGGSHYYAMDYWGQGTLVTVSS (SEQ ID NO: 1480) |
| 7E9V3-23 | EVQLLESGGGLVQPGGSLRLSCAASGYTFTEYTMEIWVRQAPGKGLE |
| | WIGGINPNNGGTSYKDSVKGRFTISRDNSKNTLYLQMNSLRAEDTAV |
| | YYCARGGSHYYAMDYWGQGTLVTVSS (SEQ ID NO: 1481) |
| 7E9V3-30 | QVQLVESGGGVVQPGRSLRLSCAASGYTFTEYTMEIWVRQAPGKGLE |
| | WIGGINPNNGGTSYKDSVKGRFTISRDNSKNTLYLQMNSLRAEDTAV |
| | YYCARGGSHYYAMDYWGQGTLVTVSS (SEQ ID NO: 1482) |
| 7E9V3-48 | EVQLVESGGGLVQPGGSLRLSCAASGYTFTEYTMEIWVRQAPGKGLE |
| | WIGGINPNNGGTSYKDSVKGRFTISRDNAKNSLYLQMNSLRAEDTAV |
| | YYCARGGSHYYAMDYWGQGTLVTVSS (SEQ ID NO: 1483) |
| 7E9V3-7 | EVQLVESGGGLVQPGGSLRLSCAASGYTFTEYTMEIWVRQAPGKGLE |
| | WIGGINPNNGGTSYKDSVKGRFTISRDNAKNSLYLQMNSLRAEDTAV |
| | YYCARGGSHYYAMDYWGQGTLVTVSS (SEQ ID NO: 1484) |
| 7E9V4-59 | QVQLQESGPGLVKPSETLSLTCTVSGYTFTEYTMEIWIRQPPGKGLEWI |
| | GGINPNNGGTSYKPSLKSRVTISVDTSKNQFSLKLSSVTAADTAVYYC |
| | ARGGSHYYAMDYWGQGTLVTVSS (SEQ ID NO: 1485) |
| 7E9V3-15 | EVQLVESGGGLVKPGGSLRLSCAASGYTFTEYTMEIWVRQAPGKGLE |
| | WIGGINPNNGGTSYKAPVKGRFTISRDDSKNTLYLQMNSLKTEDTAV |
| | YYCARGGSHYYAMDYWGQGTLVTVSS (SEQ ID NO: 1486) |
| 7E9V4-39 | QLQLQESGPGLVKPSETLSLTCTVSGYTFTEYTMEIWIRQPPGKGLEWI |
| | GGINPNNGGTSYKPSLKSRVTISVDTSKNQFSLKLSSVTAADTAVYYC |
| | ARGGSHYYAMDYWGQGTLVTVSS (SEQ ID NO: 1487) |

Antibody 8C3

| | |
|---|---|
| 8C3V1-46 | QVQLVQSGAEVKKPGASVKVSCKASGYSFTGYYMEIWVRQAPGQGL |
| | EWIGRVNPNNGGTSYNQKFQGRVTMTRDTSTSTVYMELSSLRSEDTA |
| | VYYCVLTGGYFDYWGQGTLVTVSS (SEQ ID NO: 1489) |
| 8C3V5-51 | EVQLVQSGAEVKKPGESLKISCKGSGYSFTGYYMEIWVRQMPGKGLE |
| | WIGRVNPNNGGTSYNPSFQGQVTISADKSISTAYLQWSSLKASDTAM |
| | YYCVLTGGYFDYWGQGTLVTVSS (SEQ ID NO: 1490) |
| 8C3V3-23 | EVQLLESGGGLVQPGGSLRLSCAASGYSFTGYYMEIWVRQAPGKGLE |
| | WIGRVNPNNGGTSYNDSVKGRFTISRDNSKNTLYLQMNSLRAEDTA |
| | VYYCVLTGGYFDYWGQGTLVTVSS (SEQ ID NO: 1491) |
| 8C3V1-69 | QVQLVQSGAEVKKPGSSVKVSCKASGYSFTGYYMHWVRQAPGQGL |
| | EWIGRVNPNNGGTSYNQKFQGRVTITADESTSTAYMELSSLRSEDTA |
| | VYYCVLTGGYFDYWGQGTLVTVSS (SEQ ID NO: 1492) |
| 8C3V3-30 | QVQLVESGGGVVQPGRSLRLSCAASGYSFTGYYMHWVRQAPGKGL |
| | EWIGRVNPNNGGTSYNDSVKGRFTISRDNSKNTLYLQMNSLRAEDTA |
| | VYYCVLTGGYFDYWGQGTLVTVSS (SEQ ID NO: 1493) |
| 8C3V3-48 | EVQLVESGGGLVQPGGSLRLSCAASGYSFTGYYMEIWVRQAPGKGLE |
| | WIGRVNPNNGGTSYNDSVKGRFTISRDNAKNSLYLQMNSLRAEDTA |
| | VYYCVLTGGYFDYWGQGTLVTVSS (SEQ ID NO: 1494) |
| 8C3V3-7 | EVQLVESGGGLVQPGGSLRLSCAASGYSFTGYYMEIWVRQAPGKGLE |
| | WIGRVNPNNGGTSYNDSVKGRFTISRDNAKNSLYLQMNSLRAEDTA |
| | VYYCVLTGGYFDYWGQGTLVTVSS (SEQ ID NO: 1495) |
| 8C3V4-59 | QVQLQESGPGLVKPSETLSLTCTVSGYSFTGYYMEIWIRQPPGKGLEW |
| | IGRVNPNNGGTSYNPSLKSRVTISVDTSKNQFSLKLSSVTAADTAVYY |
| | CVLTGGYFDYWGQGTLVTVSS (SEQ ID NO: 1496) |
| 8C3V3-15 | EVQLVESGGGLVKPGGSLRLSCAASGYSFTGYYMEIWVRQAPGKGLE |
| | WIGRVNPNNGGTSYNAPVKGRFTISRDDSKNTLYLQMNSLKTEDTAV |
| | YYCVLTGGYFDYWGQGTLVTVSS (SEQ ID NO: 1497) |
| 8C3V4-39 | QLQLQESGPGLVKPSETLSLTCTVSGYSFTGYYMEIWIRQPPGKGLEW |
| | IGRVNPNNGGTSYNPSLKSRVTISVDTSKNQFSLKLSSVTAADTAVYY |
| | CVLTGGYFDYWGQGTLVTVSS (SEQ ID NO: 1498) |

[0332] In some embodiments, anti-TREM2 antibodies of the present disclosure comprise a light chain variable region of any one of the antibodies listed in TABLES D1-D6, or selected from 1A7, 3A2, 3B10, 6G12, 6H6, 7A9, 7B3, 8A1, 8E10, 8F11, 8F8, 9F5, 9F5v2, 9G1, 9G3, 10A9, 1, 11A8, 12E2, 12F9, 12G6, 2C7, 2F5, 3C1, 4D7, 4D11, 6C11, 6G12, 7A3, 7C5, 7E9, 7F6, 7G1, 7H1, 8C3, 8F10, 12A1, 1E9, 2C5, 3C5, 4C12, 4F2, 5A2, 6B3, 7D1, 7D9, 11D8, 8A12, 10E7, 10B11, 10D2, 7D5, 2A7, 3G12, 6H9, 8G9, 9B4, 10A1, 11A8, 12F3, 2F8, 10E3, 1H7, 2F6, 2H8, 3A7, 7E5, 7E5v2, 7F8, 11H5, 7C5, 4F11, 12D9, 1B4v1, 1B4V2, 6H2, 7B11v1, 7B11v2, 18D8, 18E4v1, 18E4v2, 29F6v1, 29F6v2, 40D5v1, 40D5v2, 43B9, 44A8v1, 44A8v2, 44B4v1, and 44B4v2; and/or a heavy chain variable region of any one of the antibodies listed in TABLES D1-D6, or selected from 1A7, 3A2, 3B10, 6G12, 6H6, 7A9, 7B3, 8A1, 8E10, 8F11, 8F8, 9F5, 9G1, 9G3, 10A9, 10C1, 11A8, 12E2, 12F9, 12G6, 2C7, 2F5, 3C1, 4D7, 4D11, 6C11, 6G12, 7A3, 7C5, 7E9, 7F6, 7G1, 7H1, 8C3, 8F10, 12A1, 1E9, 2C5, 3C5, 4C12, 4F2, 5A2, 6B3, 7D1, 7D9, 11D8, 8A12, 10E7, 10B11, 10D2, 7D5, 2A7, 3G12, 6H9, 8G9, 9B4, 10A1, 11A8, 12F3, 2F8, 10E3, 1H7, 2F6, 2H8, 3A7, 7E5, 7F8, 11H5, 7C5, 4F11, 12D9, 1B4v1, 1B4V2, 6H2, 7B11v1, 7B11v2, 18D8, 18E4v1, 18E4v2, 29F6v1, 29F6v2, 40D5v1, 40D5v2, 43B9, 44A8v1, 44A8v2, 44B4v1, and 44B4v2.

[0333] In some embodiments, the anti-TREM2 antibody is an anti-TREM2 monoclonal antibody selected from 1A7, 3A2, 3B10, 6G12, 6H6, 7A9, 7B3, 8A1, 8E10, 8F11, 8F8, 9F5, 9G1, 9G3, 10A9, 10C1, 11A8, 12E2, 12F9, 12G6, 2C7, 2F5, 3C1, 4D7, 4D11, 6C11, 6G12, 7A3, 7C5, 7E9, 7F6, 7G1, 7H1, 8C3, 8F10, 12A1, 1E9, 2C5, 3C5, 4C12, 4F2, 5A2, 6B3, 7D1, 7D9, 11D8, 8A12, 10E7, 10B11, 10D2, 7D5, 2A7, 3G12, 6H9, 8G9, 9B4, 10A1, 11A8, 12F3, 2F8, 10E3, 1H7, 2F6, 2H8, 3A7, 7E5, 7F8, 11H5, 7C5, 4F11, 12D9, 1B4v1, 1B4V2, 6H2, 7B11v1, 7B11v2, 18D8, 18E4v1, 18E4v2, 29F6v1, 29F6v2, 40D5v1, 40D5v2, 43B9, 44A8v1, 44A8v2, 44B4v1, and 44B4v2, and humanized variants thereof.

[0334] In some embodiments, each of the light chain variable regions disclosed in listed in TABLES D1-D6, or selected from 1A7, 3A2, 3B10, 6G12, 6H6, 7A9, 7B3, 8A1, 8E10, 8F11, 8F8, 9F5, 9F5v2, 9G1, 9G3, 10A9, 10C1, 11A8, 12E2, 12F9, 12G6, 2C7, 2F5, 3C1, 4D7, 4D11, 6C11, 6G12, 7A3, 7C5, 7E9, 7F6, 7G1, 7H1, 8C3, 8F10, 12A1, 1E9, 2C5, 3C5, 4C12, 4F2, 5A2, 6B3, 7D1, 7D9, 11D8, 8A12, 10E7, 10B11, 10D2, 7D5, 2A7, 3G12, 6H9, 8G9, 9B4, 10A1, 11A8, 12F3, 2F8, 10E3, 1H7, 2F6, 2H8, 3A7, 7E5, 7E5v2, 7F8, 11H5, 7C5, 4F11, 12D9, 1B4v1, 1B4V2, 6H2, 7B11v1, 7B 11v2, 18D8, 18E4v1, 18E4v2, 29F6v1, 29F6v2, 40D5v1, 40D5v2, 43B9, 44A8v1, 44A8v2, 44B4v1, and 44B4v2; and/or each of the heavy chain variable region of any one of the antibodies listed in TABLES D1-D6, or selected from 1A7, 3A2, 3B10, 6G12, 6H6, 7A9, 7B3, 8A1, 8E10, 8F11, 8F8, 9F5, 9G1, 9G3, 10A9, 10C1, 11A8, 12E2, 12F9, 12G6, 2C7, 2F5, 3C1, 4D7, 4D11, 6C11, 6G12, 7A3, 7C5, 7E9, 7F6, 7G1, 7H1, 8C3, 8F10, 12A1, 1E9, 2C5, 3C5, 4C12, 4F2, 5A2, 6B3, 7D1, 7D9, 11D8, 8A12, 10E7, 10B11, 10D2, 7D5, 2A7, 3G12, 6H9, 8G9, 9B4, 10A1, 11A8, 12F3, 2F8, 10E3, 1H7, 2F6, 2H8, 3A7, 7E5, 7F8, 11H5, 7C5, 4F11, 12D9, 1B4v1, 1B4V2, 6H2, 7B11v1, 7B11v2, 18D8, 18E4v1, 18E4v2, 29F6v1, 29F6v2, 40D5v1, 40D5v2, 43B9, 44A8v1, 44A8v2, 44B4v1, and 44B4v2 may be attached to the light chain constant regions (TABLE EN1) and heavy chain constant regions (TABLE EN2) to form complete antibody light and heavy chains, respectively, as further discussed below. Further, each of the generated heavy and light chain sequences may be combined to form a complete antibody structure. It should be understood that the heavy chain and light chain variable regions provided herein can also be attached to other constant domains having different sequences than the exemplary sequences listed herein.

E. PCT Patent Application Publication No. WO2019/028292A1

[0335] In some embodiments, the TREM2 agonist is an antibody, or antigen binding fragment thereof, as described in PCT Patent Application Publication No. WO2019/028292A1 (“the '292 application”), which is incorporated by reference herein, in its entirety.

[0336] In some embodiments, the TREM2 binding agent comprises an antibody that comprises a light chain variable domain comprising a CDRL1, CDRL2, and CDRL3 (also referred to as HVR-L1, HVR-L2, and HVR-L3, respectively), and a heavy chain variable domain comprising a CDRH1, CDRH2, and CDRH3 (also referred to as HVR-H1, HVR-H2, and HVR-H3, respectively) disclosed in the '573 application specification. In some embodiments, the TREM2 binding agent comprises an antibody that comprises a light chain variable domain and a heavy chain variable domain disclosed in the '573 application specification.

[0337] In some embodiments, anti-TREM2 antibodies of the present disclosure bind both human and cynomolgus monkey TREM2 with an affinity that is at least about 1-fold higher than an anti-TREM2 antibody selected from anti-TREM2 antibody comprising a heavy chain variable region comprising the amino acid sequence of SEQ ID NO: 1734 and a light chain variable region comprising the amino acid sequence of SEQ ID NO: 1763 (e.g., antibody AL2p-h50); an anti-TREM2 antibody comprising a heavy chain variable region comprising the amino acid sequence of SEQ ID NO: 1798 and a light chain variable region comprising the amino acid sequence of SEQ ID NO:1810 (e.g., antibody AL2p-h77); and an anti-TREM2 antibody comprising a heavy chain variable region comprising the amino acid sequence of SEQ ID NO: 1826 and a light chain variable region comprising the amino acid sequence of SEQ ID NO: 1827 (e.g., antibody AL2). In some embodiments, anti-TREM2 antibodies of the present disclosure bind to primary human immune cells with an affinity that is at least about 10 times higher than that of an anti-TREM2 antibody selected from an anti-TREM2 antibody comprising a heavy chain variable region comprising the amino acid sequence of SEQ ID NO: 1734 and a light chain variable region comprising the amino acid sequence of SEQ ID NO: 1763; an anti-TREM2 antibody comprising a heavy chain variable region comprising the amino acid sequence of SEQ ID NO: 1798 and a light chain variable region comprising the amino acid sequence of SEQ ID NO:1810; and an anti-TREM2 antibody comprising a heavy chain variable region comprising the amino acid sequence of SEQ ID NO: 1826 and a light chain variable region comprising the amino acid sequence of SEQ ID NO: 1827. In some embodiments, anti-TREM2 antibodies of the present disclosure cluster and activate TREM2 signaling in an amount that is at least about 1-fold greater than that of an anti-TREM2 antibody selected from an anti-TREM2 antibody comprising a heavy chain variable region comprising the amino acid sequence of SEQ ID NO:1734 and a light chain variable region comprising the amino acid sequence of SEQ ID NO: 1763; an anti-TREM2 antibody comprising a heavy chain variable region comprising the amino acid sequence of SEQ ID NO: 1798 and a light chain variable region comprising the amino acid sequence of SEQ ID NO:1810; and an anti-TREM2 antibody comprising a heavy chain variable region comprising the amino acid sequence of SEQ ID NO: 1826 and a light chain variable region comprising the amino acid sequence of SEQ ID NO: 1827. In some embodiments, anti-TREM2 antibodies of the present disclosure increase immune cell survival in vitro that to an extent that is greater than an anti-TREM2 antibody selected from an anti-TREM2 antibody comprising a heavy chain variable region comprising the amino acid sequence of SEQ ID NO: 1734 and a light chain variable region comprising the amino acid sequence of SEQ ID NO: 1763; an anti-TREM2 antibody comprising a heavy chain variable region comprising the amino acid sequence of SEQ ID NO: 1798 and a light chain variable region comprising the amino acid sequence of SEQ ID NO:1810; and an anti-TREM2 antibody comprising a heavy chain variable region comprising the amino acid sequence of SEQ ID NO: 1826 and a light chain variable region comprising the amino acid sequence of SEQ ID NO: 1827. In some embodiments, anti-TREM2 antibodies of the present disclosure may also have improved in vivo half-lives. In some embodiments, anti-TREM2 antibodies of the present disclosure may also decreases plasma levels of soluble TREM2 in vivo. In some embodiments, anti-TREM2 antibodies of the present disclosure may also decrease soluble TREM2. In some embodiments, the soluble TREM2 is decreased about any of 10, 20, 30, 40, 50 or 60%.

[0338] In some embodiments, the antibody binds to a TREM2 protein, wherein the antibody comprises a heavy chain variable region and a light chain variable region, wherein the heavy chain variable region comprises: an HVR-H1 comprising the sequence according to Formula I: YAFX₁X₂X₃WMN, wherein X₁ is S or W, X₂ is S, L, or R. and X₃ is S, D, H, Q, or E (SEQ ID NO: 1828); an HVR-H2 comprising the sequence according to Formula II: RIYPGX₁GX₂TNYAX₃KX₄X₅G, wherein X₁ is D, G, E, Q, or V, X₂ is D or Q, X₃ is Q, R, H, W, Y, or G, X₄ is F, R, or W, and X₅ is Q, R, K, or H (SEQ ID NO: 1829); and an HVR-H3 comprising the sequence according to Formula III: ARLLRNX₁PGX₂SYAX₃DY, wherein X₁ is Q or K, X₂ is E, S, or A, and X₃ is M or H (SEQ ID NO: 1830), and wherein the antibody is not an antibody comprising a heavy chain variable region comprising an HVR-H1 comprising the sequence of YAFSSSWMN (SEQ ID NO:1831), an HVR-H2 comprising the sequence of RIYPGDGDTNYAQKFQG (SEQ ID NO: 1832), and an HVR-H3 comprising the sequence of ARLLRNQPGESYAMDY (SEQ ID NO: 1833). In some embodiments, the TREM2 agonist is an antibody that binds to a TREM2 protein, wherein the antibody comprises a heavy chain variable region and a light chain variable region, wherein the light chain variable region comprises: an HVR-L1 comprising the sequence according to Formula IV: RX₁SX₂SLX₃HSNX₄YTYLH, wherein X₁ is S or T, X₂ is Q, R, or S, X₃ is V or I, and. X₄ is G, R, W, Q, or A (SEQ ID NO: 1834); an HVR-L2 comprising the sequence according to Formula V: KVSNRX₁S, wherein X) is F, R, V, or K (SEQ ID NO:1835); and an HVR-L3 comprising the sequence according to Formula V: SQSTRVPYT (SEQ ID NO: 1836), and wherein the antibody is not an antibody comprising a light chain variable region comprising an HVR-L1 comprising the sequence of RSSQSLVHSNGYTYLH (SEQ ID NO: 1837), an HVR-L2 comprising the sequence of KVSNRFS (SEQ ID NO: 1838), and an HVR-L3 comprising the sequence of SQSTRVPYT (SEQ ID NO: 1836). In some embodiments, the antibody comprises a heavy chain variable region and a light chain variable region, wherein the heavy chain variable region comprises: an HVR-H1 comprising the sequence according to Formula I: YAFX₁X₂X₃WMN, wherein X₁ is S or W, X₂ is S, L, or R, and X₃ is S, D, H, Q, or E (SEQ ID NO:1828); an HVR-H2 comprising the sequence according to Formula II: RIYPGX₁GX₂TNYAX₃KX₄X₅G, wherein X₁ is D, G, E, Q, or V, X₂ is D or Q, X₃ is Q, R, H, W, Y, or G, X₄ is F, R, or W, and X₅ is Q, R, K, or H (SEQ ID NO:1829); and an HVR-H3 comprising the sequence according to Formula III: ARLLRNX₁PGX₂SYAX₃DY, wherein X₁ is Q or K, X₂ is E, S, or A, and X₃ is M or H (SEQ ID NO:1830), and the light chain variable region comprises: an HVR-L1 comprising the sequence according to Formula IV: RX₁SX₂SLX₃HSNX₄YTYLH, wherein X₁ is S or T, X₂ is Q, R, or S, X₃ is V or I, and X₄ is G, R, W, Q, or A (SEQ ID NO:1834); an HVR-L2 comprising the sequence according to Formula V: KVSNRX₁S, wherein X₁ is F, R, V, or K (SEQ ID NO: 1835); and an HVR-L3 comprising the sequence: SQSTRVPYT (SEQ ID NO: 1836), and wherein the antibody is not an antibody comprising a heavy chain variable region comprising an HVR-H1 comprising the sequence of YAFSSSWMN (SEQ ID NO:1831), an HVR-H2 comprising the sequence of RIYPGDGDTNYAQKFQG (SEQ ID NO: 1832), and an HVR-H3 comprising the sequence of ARLLRNQPGESYAMDY (SEQ ID NO:1833), and comprising a light chain variable region comprising an HVR-L1 comprising the sequence of RSSQSLVHSNGYTYLH (SEQ ID NO: 1837), an HVR-L2 comprising the sequence of KVSNRFS (SEQ ID NO: 1838), and an HVR-L3 comprising the sequence of SQSTRVPYT (SEQ ID NO: 1836).

[0339] In some embodiments, the antibody binds to a TREM2 protein, wherein the antibody comprises a heavy chain variable region and a light chain variable region, wherein the heavy chain variable region comprises: an HVR-H1 comprising a sequence selected from the group consisting of SEQ ID NOS:1839 and 1843; an HVR-H2 comprising a sequence selected from the group consisting of SEQ ID NOS:1840, 1842, 1844, and 1848; and an HVR-H3 comprising a sequence selected from the group consisting of SEQ ID NOS: 1833 and 1845; and/or the light the light chain variable region comprises: an HVR-L1 comprising a sequence selected from the group consisting of 1837, 1846, 1849, and 1851; an HVR-L2 comprising a sequence selected from the group consisting of SEQ ID NOS: 1838, 1841, and 1847; and an HVR-L3 comprising the sequence of SEQ ID NO: 1836. In some embodiments, the antibody comprises a heavy chain variable region and a light chain variable region, wherein the heavy chain variable region comprises: an HVR-H1 comprising the sequence of SEQ ID NO: 1839; an HVR-H2 comprising a sequence selected from the group consisting of SEQ ID NOS: 1840, 1842, and 1848; and an HVR-H3 comprising the sequence of SEQ ID NO: 1833; and/or the light the light chain variable region comprises: an HVR-L1 comprising a sequence selected from the group consisting of 1837, 1849, and 1851; an HVR-L2 comprising a sequence selected from the group consisting of SEQ ID NOS:1838 and 1841; and an HVR-L3 comprising the sequence of SEQ ID NO:1836.

[0340] In some embodiments, the antibody binds to a TREM2 protein, wherein the antibody comprises a heavy chain variable region and a light chain variable region, wherein the heavy chain variable region comprises the HVR-H1, HVR-H2, and HVR-H3 of antibody AL2p-2, AL2p-3, AL2p-4, AL2p-7, AL2p-8, AL2p-9, AL2p-10, AL2p-11, AL2p-12, AL2p-13, AL2p-14, AL2p-15, AL2p-16, AL2p-17, AL2p-18, AL2p-19, AL2p-20, AL2p-21, AL2p-22, AL2p-23, AL2p-24, AL2p-25, AL2p-26, AL2p-27, AL2p-28, AL2p-29, AL2p-30, AL2p-31, AL2p-32, AL2p-35, AL2p-36, AL2p-37, AL2p-38, AL2p-39, AL2p-40, AL2p-41, AL2p-42, AL2p-43, AL2p-44, AL2p-45, AL2p-46, AL2p-47, AL2p-48, AL2p-49, AL2p-50, AL2p-51, AL2p-52, AL2p-53, AL2p-54, AL2p-55, AL2p-56. AL2p-57, AL2p-58. AL2p-59, AL2p-60. AL2p-61, or AL2p-62 (as shown in TABLES E1-E3). In some embodiments, the antibody comprises a heavy chain variable region and a light chain variable region, wherein the light chain variable region comprises the HVR-L1, HVR-L2, and HVR-L3 of antibody AL2p-5, AL2p-6, AL2p-7, AL2p-8, AL2p-9, AL2p-10, AL2p-11, AL2p-12, AL2p-13, AL2p-14, AL2p-15, AL2p-16, AL2p-17, AL2p-18, AL2p-19, AL2p-20, AL2p-21, AL2p-22, AL2p-23, AL2p-24, AL2p-25, AL2p-26, AL2p-27, AL2p-28, AL2p-29, AL2p-30, AL2p-31, AL2p-32, AL2p-33, AL2p-38, AL2p-39, AL2p-40, AL2p-41, AL2p-42, AL2p-43, AL2p-44, AL2p-45, AL2p-46, AL2p-47, AL2p-48, AL2p-49, AL2p-50, AL2p-51, AL2p-52, AL2p-53, AL2p-54, AL2p-55, AL2p-56, AL2p-57, AL2p-58, AL2p-59, AL2p-60, AL2p-61, or AL2p-62 (as shown in TABLES E4-E6). In some embodiments, the antibody comprises a heavy chain variable region and a light chain variable region, wherein the heavy chain variable region comprises the HVR-H I, HVR-H2, and HVR-H3 of antibody AL2p-2, AL2p-3, AL2p-4, AL2p-7, AL2p-8, AL2p-9, AL2p-10, AL2p-11, AL2p-12, AL2p-13, AL2p-14, AL2p-15, AL2p-16, AL2p-17, AL2p-18, AL2p-19, AL2p-20, AL2p-21, AL2p-22, AL2p-23, AL2p-24, AL2p-25, AL2p-26, AL2p-27, AL2p-28, AL2p-29, AL2p-30, AL2p-31, AL2p-32, AL2p-35, AL2p-36, AL2p-37, AL2p-38, AL2p-39, AL2p-40, AL2p-41, AL2p-42, AL2p-43, AL2p-44, AL2p-45, AL2p-46, AL2p-47, AL2p-48, AL2p-49, AL2p-50, AL2p-51, AL2p-52, AL2p-53, AL2p-54, AL2p-55, AL2p-56, AL2p-57, AL2p-58, AL2p-59, AL2p-60, AL2p-61, or AL2p-62 (as shown in TABLES E1-E3); and the light chain variable region comprises the HVR-L1. HVR-L2, and HVR-L3 of antibody AL2p-5, AL2p-6, AL2p-7, AL2p-8, AL2p-9, AL2p-10, AL2p-11, AL2p-12, AL2p-13, AL2p-14, AL2p-15, AL2p-16, AL2p-17, AL2p-18, AL2p-19, AL2p-20, AL2p-21, AL2p-22. AL2p-23, AL2p-24, AL2p-25, AL2p-26, AL2p-27, AL2p-28, AL2p-29, AL2p-30, AL2p-31, AL2p-32, AL2p-33, AL2p-38, AL2p-39, AL2p-40, AL2p-41, AL2p-42, AL2p-43, AL2p-44, AL2p-45 AL2p-46, AL2p-47, AL2p-48, AL2p-49, AL2p-50, AL2p-5I, AL2p-52, AL2p-53, AL2p-54, AL2p-55, AL2p-56, AL2p-57, AL2p-58, AL2p-59, AL2p-60, AL2p-61, or AL2p-62 (as shown in TABLES E4-E6). In some embodiments, the antibody comprises a heavy chain variable region comprising an HVR-H1, HVR-H2, and HVR-H3 and a light chain variable region comprising an HVR-L1, HVR-L2, and HVR-L3, wherein the antibody comprises the HVR-H1, HVR-H2, HVR-H3, HVR-L1, HVR-L2. and HVR-L3 of antibody AL2p-2, AL2p-3, AL2p-4, AL2p-5, AL2p-6, AL2p-7, AL2p-8, AL2p-9, AL2p-10, AL2p-11, AL2p-12, AL2p-13, AL2p-14, AL2p-15, AL2p-16, AL2p-17, AL2p-18, AL2p-19, AL2p-20, AL2p-21, AL2p-22, AL2p-23, AL2p-24, AL2p-25, AL2p-26, AL2p-27, AL2p-28, AL2p-29, AL2p-30, AL2p-31, AL2p-32, AL2p-33, AL2p-35, AL2p-36, AL2p-37, AL2p-38, AL2p-39, AL2p-40, AL2p-41, AL2p-42, AL2p-43. AL2p-44, AL2p-45, AL2p-46, AL2p-47, AL2p-48, AL2p-49, AL2p-50, AL2p-51, AL2p-52, AL2p-53, AL2p-54, AL2p-55, AL2p-56, AL2p-57, AL2p-58, AL2p-59, AL2p-60, AL2p-61, or AL2p-62 (as shown in TABLES E1-E3 and TABLES E4-E6).

[0341] In some embodiments, the heavy chain variable region comprises one, two, three or four frame work regions selected from VH FRI, VH FR2, VH FR3, and VH FR4, wherein: the VH FRI comprises a sequence selected from the group consisting of SEQ ID NOS: 1716-1718, the VH FR2 comprises a sequence selected from the group consisting of SEQ ID NOS: 1719 and 1720, the VH FR3 comprises a sequence selected from the group consisting of SEQ ID NOS: 1721 and 1722, and the VH FR4 comprises the sequence of SEQ ID NO: 1723; and/or the light chain variable region comprises one, two, three or four frame work regions selected from VL FRI. VL FR2, VL FR3, and VL FR4, wherein: the VL FRI comprises a sequence selected from the group consisting of SEQ ID NOS:1724-1727, the VL FR2 comprises a sequence selected from the group consisting of SEQ ID NOS:1728 and 1729, the VL FR3 comprises a sequence selected from the group consisting of SEQ ID NOS:1730 and 1731, and the VL FR4 comprises a sequence selected from the group consisting of SEQ ID NOS: 1732 and 1733. In some embodiments, the antibody comprises a heavy chain variable region comprising an amino acid sequence selected from the group consisting of SEQ ID NOS: 1734-1777 and 1798; and/or a light chain variable region comprising an amino acid sequence selected from the group consisting of SEQ ID NOS:1799-1820 and 1825. In some embodiments, the antibody comprises the heavy chain variable region of antibody AL2p-h50, AL2p-2. AL2p-3, AL2p-4, AL2p-5, AL2p-6. AL2p-7, AL2p-8, AL2p-9, AL2p-10, AL2p-11, AL2p-12, AL2p-13, AL2p-14, AL2p-15, AL2p-16, AL2p-17, AL2p-18, AL2p-19, AL2p-20, AL2p-21, AL2p-22, AL2p-23, AL2p-24, AL2p-25, AL2p-26, AL2p-27, AL2p-28, AL2p-29, AL2p-30, AL2p-31, AL2p-32, AL2p-33, AL2p-h77, AL2p-35, AL2p-36, AL2p-37, AL2p-38, AL2p-39, AL2p-40, AL2p-41, AL2p-42, AL2p-43, AL2p-44, AL2p-45, AL2p-46, AL2p-47, AL2p-48, AL2p-49, AL2p-50, AL2p-51, AL2p-52, AL2p-53, AL2p-54, AL2p-55, AL2p-56, AL2p-57, AL2p-58, AL2p-59, AL2p-60, AL2p-61, or AL2p-62 (as shown in TABLE E15); and/or the antibody comprises the light chain variable region of antibody AL2p-h50, AL2p-2, AL2p-3. AL2p-4, AL2p-5, AL2p-6, AL2p-7. AL2p-8. AL2p-9, AL2p-10, AL2p-11, AL2p-12, AL2p-13, AL2p-14, AL2p-15, AL2p-16, AL2p-17, AL2p-18, AL2p-19, AL2p-20, AL2p-21, AL2p-22, AL2p-23, AL2p-24, AL2p-25, AL2p-26, AL2p-27, AL2p-28, AL2p-29, AL2p-30, AL2p-31, AL2p-32, AL2p-33, AL2p-h77, AL2p-35, AL2p-36, AL2p-37, AL2p-38, AL2p-39, AL2p-40, AL2p-41, AL2p-42, AL2p-43, AL2p-44, AL2p-45, AL2p-46, AL2p-47, AL2p-48, AL2p-49, AL2p-50, AL2p-5I, AL2p-52, AL2p-53, AL2p-54, AL2p-55, AL2p-56, AL2p-57, AL2p-58, AL2p-59, AL2p-60, AL2p-61, or AL2p-62 (as shown in TABLE E17). In some embodiments: (a) the HVR-H1 comprises the amino acid sequence YAFSSQWMN (SEQ ID NO: 1839), the HVR-H2 comprises the amino acid sequence RIYPGGGDTNYARKFQG (SEQ ID NO: 1840), the HVR-H3 comprises the amino acid sequence ARLLRNQPGESYAMDY (SEQ ID NO: 1833), the HVR-L1 comprises the amino acid sequence RSSQSLVHSNGYTYLH (SEQ ID NO: 1837), the HVR-L2 comprises the amino acid sequence KVSNRRS (SEQ ID NO:1841), and the HVR-L3 comprises the amino acid sequence SQSTRVPYT (SEQ ID NO: 1836); (b) the HVR-H1 comprises the amino acid sequence YAFSSQWMN (SEQ ID NO: 1839), the HVR-H2 comprises the amino acid sequence RIYPGGGDTNYAGKFQG (SEQ ID NO: 1842), the HVR-H3 comprises the amino acid sequence ARLLRNQPGESYAMDY (SEQ ID NO: 1833), the HVR-L1 comprises the amino acid sequence RSSQSLVHSNGYTYLH (SEQ ID NO: 1837), the HVR-L2 comprises the amino acid sequence KVSNRFS (SEQ ID NO: 1838), and the HVR-L3 comprises the amino acid sequence SQSTRVPYT (SEQ ID NO: 1836); (c) the HVR-H1 comprises the amino acid sequence YAFSSDWMN (SEQ ID NO: 1843), the HVR-H2 comprises the amino acid sequence RIYPGEGDTNYARKFHG (SEQ ID NO: 1844) the HVR-H3 comprises the amino acid sequence ARLLRNKPGESYAMDY (SEQ ID NO:1845) the HVR-L1 comprises the amino acid sequence RTSQSLVHSNAYTYLH (SEQ ID NO:1846), the HVR-L2 comprises the amino acid sequence KVSNRVS (SEQ ID NO: 1847). and the HVR-L3 comprises the amino acid sequence SQSTRVPYT (SEQ ID NO: 1836); (d) the HVR-H1 comprises the amino acid sequence YAFSSQWMN (SEQ ID NO: 1839), the HVR-H2 comprises the amino acid sequence RIYPGEGDTNYARKFQG (SEQ ID NO: 1848), the HVR-H3 comprises the amino acid sequence ARLLRNQPGESYAMDY (SEQ ID NO: 1833), the HVR-L1 comprises the amino acid sequence RSSQSLVHSNQYTYLH (SEQ ID NO: 1849), the HVR-L2 comprises the amino acid sequence KVSNRRS (SEQ ID NO:1841), and the HVR-L3 comprises the amino acid sequence SQSTRVPYT (SEQ ID NO: 1836); (e) the HVR-H1 comprises the amino acid sequence YAFSSQWMN (SEQ ID NO: 1839). the HVR-H2 comprises the amino acid sequence RIYPGEGDTNYAGKFQG (SEQ ID NO:1850). the HVR-H3 comprises the amino acid sequence ARLLRNQPGESYAMDY (SEQ ID NO:1833), the HVR-L1 comprises the amino acid sequence RSSQSLVHSNQYTYLH (SEQ ID NO: 1849), the HVR-L2 comprises the amino acid sequence KVSNRFS (SEQ ID NO: 1838), and the HVR-L3 comprises the amino acid sequence SQSTRVPYT (SEQ ID NO: 1836); (f) the HVR-H1 comprises the amino acid sequence YAFSSQWMN (SEQ ID NO: 1839), the HVR-H2 comprises the amino acid sequence RIYPGGGDTNYAGKFQG (SEQ ID NO: 1842). the HVR-H3 comprises the amino acid sequence ARLLRNQPGESYAMDY (SEQ ID NO: 1833), the HVR-L1 comprises the amino acid sequence RSSQSLVHSNRYTYLH (SEQ ID NO:1851), the HVR-L2 comprises the amino acid sequence KVSNRFS (SEQ ID NO: 1838), and the HVR-L3 comprises the amino acid sequence SQSTRVPYT (SEQ ID NO: 1836); or (g) the HVR-H1 comprises the amino acid sequence YAFSSQWMN (SEQ ID NO: 1839), the HVR-H2 comprises the amino acid sequence RIYPGGGDTNYARKFQG (SEQ ID NO: 1840), the HVR-H3 comprises the amino acid sequence ARLLRNQPGESYAMDY (SEQ ID NO:1833), the HVR-L1 comprises the amino acid sequence RSSQSLVHSNRYTYLH (SEQ ID NO:1851). the HVR-L2 comprises the amino acid sequence KVSNRRS (SEQ ID NO:1841), and the HVR-L3 comprises the amino acid sequence SQSTRVPYT (SEQ ID NO: 1836). In some embodiments, the HVR-H1 comprises the amino acid sequence YAFSSQWMN (SEQ ID NO: 1839), the HVR-H2 comprises the amino acid sequence RIYPGGGDTNYARKFQG (SEQ ID NO: 1840), the HVR-H3 comprises the amino acid sequence ARLLRNQPGESYAMDY (SEQ ID NO: 1833), the HVR-L1 comprises the amino acid sequence RSSQSLVHSNGYTYLH (SEQ ID NO: 1837), the HVR-L2 comprises the amino acid sequence KVSNRRS (SEQ ID NO:1841), and the HVR-L3 comprises the amino acid sequence SQSTRVPYT (SEQ ID NO: 1836). In some embodiments, the HVR-H1 comprises the amino acid sequence YAFSSQWMN (SEQ ID NO: 1839), the HVR-H2 comprises the amino acid sequence RIYPGGGDTNYAGKFQG (SEQ ID NO: 1842), the HVR-H3 comprises the amino acid sequence ARLLRNQPGESYAMDY (SEQ ID NO: 1833), the HVR-L1 comprises the amino acid sequence RSSQSLVHSNGYTYLH (SEQ ID NO: 1837), the HVR-L2 comprises the amino acid sequence KVSNRFS (SEQ ID NO: 1838), and the HVR-L3 comprises the amino acid sequence SQSTRVPYT (SEQ ID NO: 1836). In some embodiments, the HVR-H1 comprises the amino acid sequence YAFSSDWMN (SEQ ID NO: 1843), the HVR-H2 comprises the amino acid sequence RIYPGEGDTNYARKFHG (SEQ ID NO:1844), the HVR-H3 comprises the amino acid sequence ARLLRNKPGESYAMDY (SEQ ID NO: 1845), the HVR-L1 comprises the amino acid sequence RTSQSLVHSNAYTYLH (SEQ ID NO: 1846), the HVR-L2 comprises the amino acid sequence KVSNRVS (SEQ ID NO: 1847), and the HVR-L3 comprises the amino acid sequence SQSTRVPYT (SEQ ID NO: 1836). In some embodiments, the HVR-H1 comprises the amino acid sequence YAFSSQWMN (SEQ ID NO: 1839). the HVR-H2 comprises the amino acid sequence RIYPGEGDTNYARKFQG (SEQ ID NO:1848), the HVR-H3 comprises the amino acid sequence ARLLRNQPGESYAMDY (SEQ ID NO: 1833), the HVR-L1 comprises the amino acid sequence RSSQSLVHSNQYTYLH (SEQ ID NO: 1849), the HVR-L2 comprises the amino acid sequence KVSNRRS (SEQ ID NO:1841), and the HVR-L3 comprises the amino acid sequence SQSTRVPYT (SEQ ID NO: 1836). In some embodiments, the HVR-H1 comprises the amino acid sequence YAFSSQWMN (SEQ ID NO: 1839), the HVR-H2 comprises the amino acid sequence RIYPGEGDTNYAGKFQG (SEQ ID NO: 1850), the HVR-H3 comprises the amino acid sequence ARLLRNQPGESYAMDY (SEQ ID NO: 1833), the HVR-L1 comprises the amino acid sequence RSSQSLVHSNQYTYLH (SEQ ID NO: 1849), the HVR-L2 comprises the amino acid sequence KVSNRFS (SEQ ID NO: 1838), and the HVR-L3 comprises the amino acid sequence SQSTRVPYT (SEQ ID NO: 1836). In some embodiments, the HVR-H1 comprises the amino acid sequence YAFSSQWMN (SEQ ID NO: 1839), the HVR-H2 comprises the amino acid sequence RIYPGGGDTNYAGKFQG (SEQ ID NO: 1842), the HVR-H3 comprises the amino acid sequence ARLLRNQPGESYAMDY (SEQ ID NO: 1833), the HVR-L1 comprises the amino acid sequence RSSQSLVHSNRYTYLH (SEQ ID NO:1851), the HVR-L2 comprises the amino acid sequence KVSNRFS (SEQ ID NO: 1838), and the HVR-L3 comprises the amino acid sequence SQSTRVPYT (SEQ ID NO: 1836). In some embodiments, the HVR-H1 comprises the amino acid sequence YAFSSQWMN (SEQ ID NO: 1839), the HVR-H2 comprises the amino acid sequence RIYPGGGDTNYARKFQG (SEQ ID NO: 1840), the HVR-H3 comprises the amino acid sequence ARLLRNQPGESYAMDY (SEQ ID NO: 1833), the HVR-L1 comprises the amino acid sequence RSSQSLVHSNRYTYLH (SEQ ID NO:1851), the HVR-L2 comprises the amino acid sequence KVSNRRS (SEQ ID NO:1841), and the HVR-L3 comprises the amino acid sequence SQSTRVPYT (SEQ ID NO: 1836). In some embodiments, the HVR-H1 comprises the amino acid sequence YAFSSQWMN (SEQ ID NO: 1839), the HVR-H2 comprises the amino acid sequence RIYPGGGDTNYAGKFQG (SEQ ID NO: 1842), the HVR-H3 comprises the amino acid sequence ARLLRNQPGESYAMDY (SEQ ID NO: 1833), the HVR-L1 comprises the amino acid sequence RSSQSLVHSNRYTYLH (SEQ ID NO:1851), the HVR-L2 comprises the amino acid sequence KVSNRFS (SEQ ID NO: 1838), and the HVR-L3 comprises the amino acid sequence SQSTRVPYT (SEQ ID NO: 1836).

[0342] In some embodiments, the antibody comprises a heavy chain variable region and a light chain variable region, wherein the heavy chain variable region comprises Kabat CDRs; and/or the light chain variable region comprises Kabat CDRs. In some embodiments, the heavy chain variable region comprises a CDR-H1 comprising the sequence of SQWMN (SEQ ID NO:1901), a CDR-H2 comprising the sequence of RIYPGGGDTNYAGKFQG (SEQ ID NO: 1842); and a CDR-H3 comprising the sequence of LLRNQPGESYAMDY (SEQ ID NO:1902). In some embodiments, the light chain variable region comprises a CDR-L1 comprising the sequence of RSSQSLVHSNGYTYLH (SEQ ID NO:1837), a CDR-L2 comprising the sequence of KVSNRFS (SEQ ID NO:1838); and a CDR-L3 comprising the sequence of SQSTRVPYT (SEQ ID NO: 1836). In some embodiments, the heavy chain variable region comprises a CDR-H1 comprising the sequence of SQWMN (SEQ ID NO:1901), a CDR-H2 comprising the sequence of RIYPGGGDTNYAGKFQG (SEQ ID NO: 1842); and a CDR-H3 comprising the sequence of LLRNQPGESYAMDY (SEQ ID NO: 1902); and the light chain variable region comprises a CDR-L1 comprising the sequence of RSSQSLVHSNGYTYLH (SEQ ID NO:1837), a CDR-L2 comprising the sequence of KVSNRFS (SEQ ID NO: 1838); and a CDR-L3 comprising the sequence of SQSTRVPYT (SEQ ID NO: 1836).

[0343] In some embodiments, the antibody comprises a heavy chain variable region and a light chain variable region, wherein the heavy chain variable region comprises Kabat CDRs; and/or the light chain variable region comprises Kabat CDRs. In some embodiments, the heavy chain variable region comprises a CDR-H1 comprising the sequence of SDWMN (SEQ ID NO: 1903), a CDR-H2 comprising the sequence of RIYPGEGDTNYARKFHG (SEQ ID NO: 1844); and a CDR-H3 comprising the sequence of LLRNKPGESYAMDY (SEQ ID NO:1904). In some embodiments, the light chain variable region comprises a CDR-L1 comprising the sequence of RTSQSLVHSNAYTYLH (SEQ ID NO: 1846), a CDR-L2 comprising the sequence of KVSNRVS (SEQ ID NO: 1847); and a CDR-L3 comprising the sequence of SQSTRVPYT (SEQ ID NO: 1836). In some embodiments, the heavy chain variable region comprises a CDR-HI comprising the sequence of SDWMN (SEQ ID NO: 1903), a CDR-H2 comprising the sequence of RIYPGEGDTNYARKFHG (SEQ ID NO:1844); and a CDR-H3 comprising the sequence of LLRNKPGESYAMDY (SEQ ID NO: 1904); and the light chain variable region comprises a CDR-L1 comprising the sequence of RTSQSLVHSNAYTYLH (SEQ ID NO: 1846), a CDR-L2 comprising the sequence of KVSNRVS (SEQ ID NO: 1847); and a CDR-L3 comprising the sequence of SQSTRVPYT (SEQ ID NO: 1836).

[0344] In some embodiments, the antibody comprises a heavy chain variable region and a light chain variable region, wherein the heavy chain variable region comprises Kabat CDRs; and/or the light chain variable region comprises Kabat CDRs. In some embodiments, the heavy chain variable region comprises a CDR-H1 comprising the sequence of SQWMN (SEQ ID NO:1901), a CDR-H2 comprising the sequence of RIYPGGGDTNYAGKFQG (SEQ ID NO: 1842); and a CDR-H3 comprising the sequence of LLRNQPGESYAMDY (SEQ ID NO:1902). In some embodiments, the light chain variable region comprises a CDR-L1 comprising the sequence of RSSQSLVHSNRYTYLH (SEQ ID NO:1851), a CDR-L2 comprising the sequence of KVSNRFS (SEQ ID NO:1838); and a CDR-L3 comprising the sequence of SQSTRVPYT (SEQ ID NO: 1836). In some embodiments, the heavy chain variable region comprises a CDR-H1 comprising the sequence of SQWMN (SEQ ID NO: 1901), a CDR-H2 comprising the sequence of RIYPGGGDTNYAGKFQG (SEQ ID NO: 1842); and a Kabat CDR-H3 comprising the sequence of LLRNQPGESYAMDY (SEQ ID NO: 1902); and the light chain variable region comprises a CDR-L1 comprising the sequence of RSSQSLVHSNRYTYLH (SEQ ID NO:1851), a CDR-L2 comprising the sequence of KVSNRFS (SEQ ID NO: 1838); and a CDR-L3 comprising the sequence of SQSTRVPYT (SEQ ID NO: 1836).

[0345] In some embodiments, the antibody comprises a heavy chain variable region and a light chain variable region, wherein the heavy chain variable region comprises Kabat CDRs; and/or the light chain variable region comprises Kabat CDRs. In some embodiments, the heavy chain variable region comprises a CDR-H1 comprising the sequence of SQWMN (SEQ ID NO:1901), a CDR-H2 comprising the sequence of RIYPGGGDTNYARKFQG (SEQ ID NO: 1840); and a CDR-H3 comprising the sequence of LLRNQPGESYAMDY (SEQ ID NO:1902). In some embodiments, the light chain variable region comprises a CDR-L1 comprising the sequence of RSSQSLVHSNRYTYLH (SEQ ID NO:1851), a CDR-L2 comprising the sequence of KVSNRRS (SEQ ID NO:1841); and a CDR-L3 comprising the sequence of SQSTRVPYT (SEQ ID NO: 1836). In some embodiments, the heavy chain variable region comprises a CDR-H1 comprising the sequence of SQWMN (SEQ ID NO: 1901), a CDR-H2 comprising the sequence of RIYPGGGDTNYARKFQG(SEQ ID NO: 1840); and a CDR-H3 comprising the sequence of LLRNQPGESYAMDY (SEQ ID NO: 1902); and the light chain variable region comprises a CDR-L1 comprising the sequence of RSSQSLVHSNRYTYLH (SEQ ID NO:1851), a CDR-L2 comprising the sequence of KVSNRRS (SEQ ID NO:1841); and a CDR-L3 comprising the sequence of SQSTRVPYT (SEQ ID NO: 1836).

[0346] In some embodiments, the antibody comprises a heavy chain variable region and a light chain variable region, wherein the heavy chain variable region comprises Kabat CDRs; and/or the light chain variable region comprises Kabat CDRs. In some embodiments, the heavy chain variable region comprises a CDR-H1 comprising the sequence of SQWMN (SEQ ID NO:1901), a CDR-H2 comprising the sequence of RIYPGEGDTNYARKFQG (SEQ ID NO: 1848); and a CDR-H3 comprising the sequence of LLRNQPGESYAMDY (SEQ ID NO:1902). In some embodiments, the light chain variable region comprises a CDR-L1 comprising the sequence of RSSQSLVHSNQYTYLH (SEQ ID NO:1849), a CDR-L2 comprising the sequence of KVSNRRS (SEQ ID NO:1841); and a CDR-L3 comprising the sequence of SQSTRVPYT (SEQ ID NO: 1836). In some embodiments, the heavy chain variable region comprises a CDR-H1 comprising the sequence of SQWMN (SEQ ID NO: 1901), a CDR-H2 comprising the sequence of RIYPGEGDTNYARKFQG (SEQ ID NO:1848); and a CDR-H3 comprising the sequence of LLRNQPGESYAMDY (SEQ ID NO: 1902); and the light chain variable region comprises a CDR-L1 comprising the sequence of RSSQSLVHSNQYTYLH (SEQ ID NO:1849), a CDR-L2 comprising the sequence of KVSNRRS (SEQ ID NO:1841); and a CDR-L3 comprising the sequence of SQSTRVPYT (SEQ ID NO: 1836).

[0347] In some embodiments, the antibody comprises a heavy chain variable region comprising an amino acid sequence selected from the group consisting of SEQ ID NOS:1734-1778 and 1798; and/or a light chain variable region comprising an amino acid sequence selected from the group consisting of SEQ ID NOS: 1799-1820 and 1825. In some embodiments, the antibody comprises the heavy chain variable region of antibody AL2p-h50, AL2p-2, AL2p-3, AL2p-4, AL2p-5, AL2p-6, AL2p-7, AL2p-8, AL2p-9, AL2p-I0, AL2p-11, AL2p-12, AL2p-13, AL2p-14, AL2p-15, AL2p-16, AL2p-17, AL2p-18, AL2p-19, AL2p-20, AL2p-21, AL2p-22, AL2p-23, AL2p-24, AL2p-25, AL2p-26, AL2p-27, AL2p-28, AL2p-29, AL2p-30, AL2p-31, AL2p-32, AL2p-33, AL2p-h77, AL2p-35, AL2p-36, AL2p-37, AL2p-38, AL2p-39, AL2p-40, AL2p-41, AL2p-42, AL2p-43, AL2p-44, AL2p-45, AL2p-46, AL2p-47, AL2p-48, AL2p-49, AL2p-50, AL2p-51, AL2p-52, AL2p-53, AL2p-54, AL2p-55, AL2p-56, AL2p-57, AL2p-58, AL2p-59, AL2p-60, AL2p-61, or AL2p-62 (as shown in TABLE E15); and/or the antibody comprises the light chain variable region of antibody AL2p-h50, AL2p-2, AL2p-3, AL2p-4, AL2p-5, AL2p-6, AL2p-7, AL2p-8, AL2p-9, AL2p-10, AL2p-11, AL2p-12, AL2p-13, AL2p-14, AL2p-15, AL2p-16, AL2p-17, AL2p-18, AL2p-19, AL2p-20, AL2p-21, AL2p-22, AL2p-23, AL2p-24, AL2p-25, AL2p-26, AL2p-27, AL2p-28, AL2p-29, AL2p-30, AL2p-31, AL2p-32, AL2p-33, AL2p-h77, AL2p-35, AL2p-36, AL2p-37, AL2p-38, AL2p-39, AL2p-40, AL2p-41, AL2p-42, AL2p-43, AL2p-44, AL2p-45, AL2p-46, AL2p-47, AL2p-48, AL2p-49, AL2p-50, AL2p-51, AL2p-52, AL2p-53, AL2p-54, AL2p-55, AL2p-56, AL2p-57, AL2p-58, AL2p-59, AL2p-60, AL2p-61, or AL2p-62 (as shown in TABLE E17). In some embodiments: (a) the heavy chain variable region comprises the amino acid sequence of SEQ ID NO: 1760, and/or the light chain variable region comprises the amino acid sequence of SEQ ID NO: 1804; (b) the heavy chain variable region comprises the amino acid sequence of SEQ ID NO:1766; and/or the light chain variable region comprises the amino acid sequence of SEQ ID NO: 1811; (c) the heavy chain variable region comprises the amino acid sequence of SEQ ID NO:1771; and/or the light chain variable region comprises the amino acid sequence of SEQ ID NO:1815; (d) the heavy chain variable region comprises the amino acid sequence of SEQ ID NO: 1777; and/or the light chain variable region comprises the amino acid sequence of SEQ ID NO: 1817; (e) the heavy chain variable region comprises the amino acid sequence of SEQ ID NO: 1778; and/or the light chain variable region comprises the amino acid sequence of SEQ ID NO: 1818; (f) the heavy chain variable region comprises the amino acid sequence of SEQ ID NO: 1766; and/or the light chain variable region comprises the amino acid sequence of SEQ ID NO: 1819; or (g) the heavy chain variable region comprises the amino acid sequence of SEQ ID NO: 1760; and/or the light chain variable region comprises the amino acid sequence of SEQ ID NO: 1820. In some embodiments, the antibody comprises an Fc region comprising an amino acid sequence selected from the group consisting of SEQ ID NOS: 1853-1863. In some embodiments, the antibody comprises an Fe region comprising the amino acid sequence of SEQ ID NO:1853. In some embodiments, the antibody comprises an Fc region comprising the amino acid sequence of SEQ ID NO: 1854. In some embodiments, the antibody comprises an Fc region comprising the amino acid sequence of SEQ ID NO: 1855. In some embodiments, the antibody comprises an Fc region comprising the amino acid sequence of SEQ ID NO: 1856. In some embodiments, the antibody comprises an Fc region comprising the amino acid sequence of SEQ ID NO: 1857. In some embodiments, the antibody comprises an Fc region comprising the amino acid sequence of SEQ ID NO: 1858. In some embodiments, the antibody comprises an Fe region comprising the amino acid sequence of SEQ ID NO: 1859. In some embodiments, the antibody comprises an Fc region comprising the amino acid sequence of SEQ ID NO: 1860. In some embodiments, the antibody comprises an Fc region comprising the amino acid sequence of SEQ ID NO: 1861. In some embodiments, the antibody comprises an Fc region comprising the amino acid sequence of SEQ ID NO: 1862. In some embodiments, the antibody comprises an Fc region comprising the amino acid sequence of SEQ ID NO: 1863. In some embodiments, the antibody comprises a heavy chain comprising an amino acid sequence selected from the group consisting of SEQ ID NOS:1905-1920; and/or a light chain comprising an amino acid sequence selected from the group consisting of SEQ ID NOS:1921-1925. In some embodiments, the antibody comprises a heavy chain comprising an amino acid sequence selected from the group consisting of SEQ ID NOS:1905 and 1906; and a light chain comprising the amino acid sequence of SEQ ID NO:1921. In some embodiments, the antibody comprises a heavy chain comprising an amino acid sequence selected from the group consisting of SEQ ID NOS: 1907 and 1908; and a light chain comprising the amino acid sequence of SEQ ID NO:1921. In some embodiments, the antibody comprises a heavy chain comprising an amino acid sequence selected from the group consisting of SEQ ID NOS: 1909 and 1910; and a light chain comprising the amino acid sequence of SEQ ID NO: 1922. In some embodiments, the antibody comprises a heavy chain comprising an amino acid sequence selected from the group consisting of SEQ ID NOS:1911 and 1912; and a light chain comprising the amino acid sequence of SEQ ID NO:1922. In some embodiments, the antibody comprises a heavy chain comprising an amino acid sequence selected from the group consisting of SEQ ID NOS: 1913 and 1914; and a light chain comprising the amino acid sequence of SEQ ID NO: 1923. In some embodiments, the antibody comprises a heavy chain comprising an amino acid sequence selected from the group consisting of SEQ ID NOS:1915 and 1916; and a light chain comprising the amino acid sequence of SEQ ID NO: 1925. in some embodiments, the antibody comprises a heavy chain comprising an amino acid sequence selected from the group consisting of SEQ ID NOS:1917 and 1918; and a light chain comprising the amino acid sequence of SEQ ID NO:1925. In some embodiments, the antibody comprises a heavy chain comprising an amino acid sequence selected from the group consisting of SEQ ID NOS: 1919 and 1920; and a light chain comprising the amino acid sequence of SEQ ID NO: 1924.

[0348] In some embodiments, the heavy chain variable region comprises the amino acid sequence of SEQ ID NO: 1760, and/or the light chain variable region comprises the amino acid sequence of SEQ ID NO: 1804. In some embodiments, the heavy chain variable region comprises the amino acid sequence of SEQ ID NO: 1766; and/or the light chain variable region comprises the amino acid sequence of SEQ ID NO:1811. In some embodiments, the heavy chain variable region comprises the amino acid sequence of SEQ ID NO:1771; and/or the light chain variable region comprises the amino acid sequence of SEQ ID NO:1815. In some embodiments, the heavy chain variable region comprises the amino acid sequence of SEQ ID NO: 1777; and/or the light chain variable region comprises the amino acid sequence of SEQ ID NO:1817. In some embodiments, the heavy chain variable region comprises the amino acid sequence of SEQ ID NO: 1778; and/or the light chain variable region comprises the amino acid sequence of SEQ ID NO:1718. In some embodiments, the heavy chain variable region comprises the amino acid sequence of SEQ ID NO: 1766; and/or the light chain variable region comprises the amino acid sequence of SEQ ID NO:1819. In some embodiments, the heavy chain variable region comprises the amino acid sequence of SEQ ID NO: 1760; and/or the light chain variable region comprises the amino acid sequence of SEQ ID NO:1820.

[0349] In some embodiments, the antibody comprises a heavy chain variable region comprising an amino acid sequence selected from the group consisting of SEQ ID NOS: 1734, 1763 and 1779-1797; and/or a light chain variable region comprising an amino acid sequence selected from the group consisting of SEQ ID NOS:1799, 1811, and 1821-1824. In some embodiments, the antibody comprises the heavy chain variable region of antibody AL2p-h19, AL2p-h21, AL2p-h22, AL2p-h23, AL2p-h24, AL2p-h25, AL2p-h26, AL2p-h27, AL2p-h28, AL2p-h29, AL2p-h30, AL2p-h31, AL2p-h32, AL2p-h33, AL2p-h34, AL2p-1135, AL2p-h36, AL2p-h42, AL2p-h43, AL2p-h44, AL2p-h47, AL2p-h59, AL2p-h76, or AL2p-h90 (as shown in TABLE E15); and/or the antibody comprises the light chain variable region of antibody AL2p-h19, AL2p-h21, AL2p-h22, AL2p-h23, AL2p-h24, AL2p-h25, AL2p-h26, AL2p-h27, AL2p-h28, AL2p-h29, AL2p-h30, AL2p-h31, AL2p-h32, AL2p-h33, AL2p-h34, AL2p-h35, AL2p-h36, AL2p-h42, AL2p-h43, AL2p-h44, AL2p-h47, AL2p-h59, AL2p-h76, or AL2p-h90 (as shown in TABLE E17).

[0350] In some embodiments, the antibody comprises a heavy chain comprising an amino acid sequence selected from the group consisting of SEQ ID NOS: 1905-1920; and/or a light chain comprising an amino acid sequence selected from the group consisting of SEQ ID NOS: 1921-1925. In some embodiments, the antibody comprises a heavy chain comprising an amino acid sequence selected from the group consisting of SEQ ID NOS: 1905 and 1906; and a light chain comprising the amino acid sequence of SEQ ID NO:1921. In some embodiments, the antibody comprises a heavy chain comprising an amino acid sequence selected from the group consisting of SEQ ID NOS: 1907 and 1908; and a light chain comprising the amino acid sequence of SEQ ID NO:1921. In some embodiments, the antibody comprises a heavy chain comprising an amino acid sequence selected from the group consisting of SEQ ID NOS:1909 and 1910; and a light chain comprising the amino acid sequence of SEQ ID NO:1922. In some embodiments, the antibody comprises a heavy chain comprising an amino acid sequence selected from the group consisting of SEQ ID NOS: 1911 and 1912; and a light chain comprising the amino acid sequence of SEQ ID NO: 1922. In some embodiments, the antibody comprises a heavy chain comprising an amino acid sequence selected from the group consisting of SEQ ID NOS:1913 and 1914; and a light chain comprising the amino acid sequence of SEQ ID NO: 1923. In some embodiments, the antibody comprises a heavy chain comprising an amino acid sequence selected from the group consisting of SEQ ID NOS:1915 and 1916; and a light chain comprising the amino acid sequence of SEQ ID NO:1925. In some embodiments, the antibody comprises a heavy chain comprising an amino acid sequence selected from the group consisting of SEQ ID NOS: 1917 and 1918; and a light chain comprising the amino acid sequence of SEQ ID NO: 1925. In some embodiments, the antibody comprises a heavy chain comprising an amino acid sequence selected from the group consisting of SEQ ID NOS:1919 and 1920; and a light chain comprising the amino acid sequence of SEQ ID NO: 1924.

[0351] In some embodiments that may be combined with any of the preceding embodiments, the antibody is a bispecific antibody recognizing a first antigen and a second antigen, wherein the first antigen is human TREM2 or a naturally occurring variant thereof, and the second antigen is: (a) an antigen facilitating transport across the blood-brain-barrier; (b) an antigen facilitating transport across the blood-brain-barrier selected from the group consisting of transferrin receptor (TR), insulin receptor (HIR), insulin-like growth factor receptor (IGFR), low-density lipoprotein receptor related proteins 1 and 2 (LPR-1 and 2), diphtheria toxin receptor, CRM197, a llama single domain antibody, TMEM 30(A), a protein transduction domain, TAT, Syn-B, penetratin, a poly-arginine peptide, an angiopeptide, and ANG1005; (c) a disease-causing agent selected from the group consisting of disease-causing peptides or proteins or, disease-causing nucleic acids, wherein the disease-causing nucleic acids are antisense GGCCCC (G2C4) repeat-expansion RNA, the disease-causing proteins are selected from the group consisting of amyloid beta, oligomeric amyloid beta, amyloid beta plaques, amyloid precursor protein or fragments thereof, Tau, TAPP, alpha-synuclein, TDP-43, FUS protein, C9orf72 (chromosome 9 open reading frame 72), c9RAN protein, prion protein, PrPSc, huntingtin, calcitonin, superoxide dismutase, ataxin, ataxin 1, ataxin 2, ataxin 3, ataxin 7, ataxin 8, ataxin 10, Lewy body, atrial natriuretic factor, islet amyloid polypeptide, insulin, apolipoprotein A1, serum amyloid A, medin, prolactin, transthyretin, lysozyme, beta 2 microglobulin, gelsolin, keratoepithelin, cystatin, immunoglobulin light chain AL, S-IBM protein, Repeat-associated non-ATG (RAN) translation products, DiPeptide repeat (DPR) peptides, glycine-alanine (GA) repeat peptides, glycine-proline (GP) repeat peptides, glycine-arginine (GR) repeat peptides, proline-alanine (PA) repeat peptides, ubiquitin, and proline-arginine (PR) repeat peptides; (d) ligands and/or proteins expressed on immune cells, wherein the ligands and/or proteins selected from the group consisting of CD40, OX40, ICOS, CD28, CD137/4-1BB, CD27, GITR, PD-L1, CTLA-4, PD-L2, PD-1, B7-H3, B7-H4, HVEM, BTLA, KIR, GAL9, TIM3, A2AR, LAG-3, and phosphatidylserine; and (e) a protein, lipid, polysaccharide, or glycolipid expressed on one or more tumor cells. In some embodiments, the antibody binds specifically to both human TREM2 and cynomolgus monkey TREM2. In some embodiments, the antibody has a dissociation constant (K_{D}) for human TREM2 and/or cynomolgus monkey TREM2 that is at least 1-fold lower than an anti-TREM2 antibody comprising a heavy chain variable region comprising the amino acid sequence of SEQ ID NO:1734 and a light chain variable region comprising the amino acid sequence of SEQ ID NO: 1763; or at least 1-fold lower than an anti-TREM2 antibody comprising a heavy chain variable region comprising the amino acid sequence of SEQ ID NO:1798 and a light chain variable region comprising the amino acid sequence of SEQ ID NO:1810. In some embodiments, the antibody has a dissociation constant (K_{D}) for human TREM2 that ranges from about 9 μM to about 100 μM, or less than 100 μM, wherein the K_{D} is determined at a temperature of approximately 25° C. In some embodiments, the antibody has a dissociation constant (K_{D}) for cynomolgus monkey TREM2 that ranges from about 50 nM to about 100 μM, or less than 100 μM, wherein the K_{D} is determined at a temperature of approximately 25° C. In some embodiments, the antibody binds to primary human immune cells with an affinity that is at least 10 times higher than that of an anti-TREM2 antibody comprising a heavy chain variable region comprising the amino acid sequence of SEQ ID NO: 1734 and a light chain variable region comprising the amino acid sequence of SEQ ID NO: 1763; or at least 10 times higher than an anti-TREM2 antibody comprising a heavy chain variable region comprising the amino acid sequence of SEQ ID NO: 1798 and a light chain variable region comprising the amino acid sequence of SEQ ID NO:1810. In some embodiments, the antibody clusters and activates TREM2 signaling in an amount that is at least 1-fold greater than that of an anti-TREM2 antibody comprising a heavy chain variable region comprising the amino acid sequence of SEQ ID NO:1734 and a light chain variable region comprising the amino acid sequence of SEQ ID NO: 1763; or at least 1-fold greater than an anti-TREM2 antibody comprising a heavy chain variable region comprising the amino acid sequence of SEQ ID NO: 1798 and a light chain variable region comprising the amino acid sequence of SEQ ID NO:1810. In some embodiments, the antibody increases immune cell survival in vitro that to an extent that is greater than an anti-TREM2 antibody comprising a heavy chain variable region comprising the amino acid sequence of SEQ ID NO:1734 and a light chain variable region comprising the amino acid sequence of SEQ ID NO: 1763; or that is greater than an anti-TREM2 antibody comprising a heavy chain variable region comprising the amino acid sequence of SEQ ID NO:1798 and a light chain variable region comprising the amino acid sequence of SEQ ID NO:1810. In some embodiments, the antibody has an in vivo half-life that is lower than a human control IgG1 antibody. In some embodiments, the antibody decreases plasma levels of soluble TREM2 in vivo by an amount that is at least 25% greater than that of a human control IgG1 antibody. In some embodiments, the antibody decreases plasma levels of soluble TREM2 in vivo by blocking cleavage, by inhibiting one or more metalloproteases, and/or by inducing internalization. In some embodiments, soluble TREM2 is decreased by about any of 10, 20, 30, 40, or 50%. In some embodiments, the antibody competes with one or more antibodies selected from the group consisting of AL2p-h50, AL2p-2, AL2p-3, AL2p-4, AL2p-5, AL2p-6, AL2p-7, AL2p-8, AL2p-9, AL2p-10, AL2p-11, AL2p-12, AL2p-13, AL2p-14, AL2p-15, AL2p-16, AL2p-17, AL2p-18, AL2p-19, AL2p-20, AL2p-21, AL2p-22, AL2p-23, AL2p-24, AL2p-25, AL2p-26, AL2p-27, AL2p-28, AL2p-29, AL2p-30, AL2p-31, AL2p-32, AL2p-33, AL2p-h77, AL2p-35, AL2p-36, AL2p-37, AL2p-38, AL2p-39, AL2p-40, AL2p-41, AL2p-42, AL2p-43, AL2p-44, AL2p-45, AL2p-46, AL2p-47, AL2p-48, AL2p-49, AL2p-50, AL2p-51, AL2p-52, AL2p-53, AL2p-54, AL2p-55, AL2p-56, AL2p-57, AL2p-58, AL2p-59, AL2p-60, AL2p-61, AL2p-62, AL2p-h19, AL2p-h21, AL2p-h22, AL2p-h23, AL2p-h24, AL2p-h25, AL2p-h26, AL2p-h27, AL2p-h28, AL2p-h29, AL2p-h30, AL2p-h31, AL2p-h32, AL2p-h33, AL2p-h34, AL2p-h35, AL2p-h36, AL2p-h42, AL2p-h43, AL2p-h44, AL2p-h47, AL2p-1159, AL2p-h76, AL2p-h90, and any combination thereof for binding to TREM2. In some embodiments, the antibody binds essentially the same TREM2 epitope as an antibody selected from the group consisting of: AL2p-h50, AL2p-2, AL2p-3, AL2p-4, AL2p-5, AL2p-6, AL2p-7, AL2p-8, AL2p-9, AL2p-10, AL2p-11, AL2p-12, AL2p-13, AL2p-14, AL2p-15, AL2p-16, AL2p-17, AL2p-18, AL2p-19, AL2p-20, AL2p-21, AL2p-22, AL2p-23, AL2p-24, AL2p-25, AL2p-26, AL2p-27, AL2p-28, AL2p-29, AL2p-30, AL2p-31, AL2p-32, AL2p-33, AL2p-h77, AL2p-35, AL2p-36, AL2p-37, AL2p-38, AL2p-39, AL2p-40, AL2p-41, AL2p-42, AL2p-43, AL2p-44, AL2p-45, AL2p-46, AL2p-47, AL2p-48, AL2p-49, AL2p-50, AL2p-51, AL2p-52, AL2p-53, AL2p-54, AL2p-55, AL2p-56, AL2p-57, AL2p-58, AL2p-59, AL2p-60, AL2p-61, AL2p-62, AL2p-h19, AL2p-h21, AL2p-h22, AL2p-h23, AL2p-h24, AL2p-h25, AL2p-h26, AL2p-h27, AL2p-h28, AL2p-h29, AL2p-h30, AL2p-h31, AL2p-h32, AL2p-h33, AL2p-h34, AL2p-h35, AL2p-h36, AL2p-h42, AL2p-h43, AL2p-h44, AL2p-h47, AL2p-h59, AL2p-h76, and AL2p-h90. In some embodiments, the antibody binds to one or more amino acids within amino acid residues 149-157 of SEQ ID NO: 1. In some embodiments, the antibody binds to one or more amino acid residues selected from the group consisting of E151, D152, and E156 of SEQ ID NO: 1.

[0352] In some embodiments, the antibody is an antibody disclosed in Tables 2A, 2B, 2C, 3A, 3B, 3C, 4A-4D, 5A-5D, 6A, 6B, 7A or 7B of PCT Patent Application Publication No. WO2019/028292A1, reproduced below as TABLES E1-E18.

TABLE E1
Heavy chain HVR H1 sequences of
anti-TREM2 antibodies

| Ab | HVR H1 |
|---|---|
| AL2p-h50, AL2p-2, AL2p-3, | YAFSSSWMN |
| AL2p-4, AL2p-5, AL2p-6, | (SEQ ID |
| AL2p-33, AL2p-h77, and | NO: 1831) |
| AL2p-36 | |
| AL2p-29, AL2p-30, AL2p-31, | YAFSSQWMN |
| AL2p-37, AL2p-58, AL2p-60, | (SEQ ID |
| AL2p-61, and AL2p-62 | NO: 1839) |
| AL2p-10, AL2p-11, AL2p-45, | YAFSSDWMN |
| AL2p-46, AL2p-47, AL2p-48, | (SEQ ID |
| and AL2p-49 | NO: 1843) |
| AL2p-7 and AL2p-8 | YAFSLSWMN |
| | (SEQ ID |
| | NO: 1864) |
| AL2p-9 | YAFSRSWMN |
| | (SEQ ID |
| | NO: 1865) |
| AL2p-12, AL2p-13, AL2p-14, | YAFSSHWMN |
| AL2p-15, AL2p-16, AL2p-17, | (SEQ ID |
| AL2p-18, AL2p-19, AL2p-20, | NO: 1866) |
| AL2p-21, AL2p-22, AL2p-23, | |
| AL2p-24, AL2p-25,AL2p-26 | |
| AL2p-27, AL2p-28, AL2p-38, | |
| AL2p-39, AL2p-40, AL2p-41, | |
| AL2p-42, AL2p-43, AL2p-44, | |
| AL2p-50, AL2p-51, AL2p-52, | |
| AL2p-53, AL2p-54. AL2p-55, | |
| AL2p-56, AL2p-57, and | |
| AL2p-59 | |
| AL2p-32 | YAFSSEWMN |
| | (SEQ ID |
| | NO: 1867) |
| AL2P-35 | YAFWSSWMN |
| | (SEQ ID |
| | NO: 1868) |
| Formula I | YAFX₁X₂X₃WMN |
| | X₁ is S or W |
| | X₂ is S, L, or R |
| | X₃ is S, D, H, |
| | Q, or E |
| | (SEQ ID |
| | NO: 1828) |

TABLE E2
Heavy chain HVR H2 sequences of
anti-TREM2 antibodies

| Ab | HVR H2 |
|---|---|
| AL2p-h50, AL2p-5, | RIYPGDGDTNYAQKFQG |
| AL2p-6, AL2p-9, | (SEQ ID NO: 1832) |
| AL2p-10, AL2p-14, | |
| AL2p-15, AL2p-29, | |
| AL2p-32, AL2p-33, | |
| AL2p-h77, and | |
| AL2p-35 | |
| AL2p-31 and AL2p-60 | RIYPGGGDTNYARKFQG |
| | (SEQ ID NO: 1840) |
| AL2p-37 and AL2p-58 | RIYPGGGDTNYAGKFQG |
| | (SEQ ID NO: 1842) |
| AL2p47, AL2p-48, | RIYPGEGDTNYARKFHG |
| AL2p-49 | (SEQ ID NO: 1844) |
| AL2p-45, AL2p46, | RIYPGEGDTNYARKFQG |
| and AL2p-61 | (SEQ ID NO: 1848) |
| AL2p-62 | RIYPGEGDTNYAGKFQG |
| | (SEQ ID NO: 1850) |
| AL2p-2 and AL2p-24 | RIYPGGGDTNYAQKFQG |
| | (SEQ ID NO: 1869) |
| AL2p-3 | RIYPGEGDTNYAQKFQG |
| | (SEQ ID NO: 1870) |
| AL2p-4 and AL2p-27 | RIYPGQGDTNYAQKFQG |
| | (SEQ ID NO: 1871) |
| AL2p-7 and AL2p-16 | RIYPGDGDTNYAQKFRG |
| | (SEQ ID NO: 1872) |
| AL2p-8, AL2p-11, | RIYPGDGDTNYARKFQG |
| AL2p-19, AL2p-20, | (SEQ ID NO: 1873) |
| and AL2p-36 | |
| AL2p-12 | RIYPGDGDTNYAHKFQG |
| | (SEQ ID NO: 1874) |
| AL2p-13 | RIYPGDGDTNYAQKFKG |
| | (SEQ ID NO: 1875) |
| AL2p-17 | RIYPGDGDTNYAQKRQG |
| | (SEQ ID NO: 1876) |
| AL2p-18 | RIYPGDGDTNYAQKWQG |
| | (SEQ ID NO: 1877) |
| AL2p-21 and AL2p-30 | RIYPGDGDTNYAWKFQG |
| | (SEQ ID NO: 1878) |
| AL2p-22 | RIYPGDGDTNYAYKFQG |
| | (SEQ ID NO: 1879) |
| AL2p-23 | RIYPGDGQTNYAQKRQG |
| | (SEQ ID NO: 1880) |
| AL2p-25, AL2p-38, | RIYPGGGDTNYAQKFRG |
| AL2p-39, and AL2p-40 | (SEQ ID NO: 1881) |
| AL2p-26 | RIYPGGGDTNYAQKRQG |
| | (SEQ ID NO: 1882) |
| AL2p-28 | RIYPGVGDTNYAQKFQG |
| | (SEQ ID NO: 1883) |
| AL2p-41 and AL2p-42 | RIYPGEGDTNYAQKFRG |
| | (SEQ ID NO: 1884) |
| AL2p-43 and AL2p44 | RIYPGGGDTNYARKFRG |
| | (SEQ ID NO: 1885) |
| AL2p-50, AL2p-51, | RIYPGEGDTNYAQKFHG |
| AL2p-52, AL2p-53, | (SEQ ID NO: 1886) |
| AL2p-54, AL2p-55, | |
| AL2p-56, and AL2p-57 | |
| AL2p-59 | RIYPGEGQTNYAQKRQG |
| | (SEQ ID NO: 1887) |
| Formula II | RIYPGX1GX2TNYAX₃KX₄ |
| | X₅G |
| | X₁ is D, G, E, Q, |
| | or V |
| | X₂ is D or Q |
| | X₁ is Q, R, H, W, |
| | Y, or G |
| | X₄ is F, R, or W |
| | X₅ is Q, R, K, or H |
| | (SEQ ID NO: 1829) |

TABLE E3
Heavy chain HVR H3 sequences of
anti-TREM2 antibodies

| Ab | HVR 113 |
|---|---|
| AL2p-h50, AL2p-2, AL2p-3, | ARLLRNQPGESYAMDY |
| AL2p-4, AL2p-5, AL2p-6, | (SEQ ID NO: |
| AL2p-7, AL2p-10, AL2p-11, | 1833) |
| AL2p-12, AL2p-13, AL2p-14. | |
| AL2p-15,, Al2p-17, AL2p-19, | |
| AL2p-20, AL2p-21, AL2p-22, | |
| AL2p-23, AL2p-24, AL2p-25, | |
| AL2p-26, AL2p-27, AL2p-28, | |
| AL2p-29, AL2p-30. AL2p-31, | |
| AL2p-32, AL2p-33, AL2p-h77, | |
| AL2p-37, AL2p-50, AL2p-51, | |
| AL2p-52, AL2p-53, AL2p-58, | |
| AL2p-59. AL2p-60, AL2p-61, | |
| and AL2p-62 | |
| AL2p-45, AL2p-46, AL2p-47, | ARLLRNKPGESYAMDY |
| AL2p-48, AL2p-49, AL2p-54, | (SEQ ID NO: |
| AL2p-55, AL2p-56, and | 1845) |
| AL2p-57 | |
| AL2p-8 and AL2p-18 | ARLLRNQPGSSYAMDY |
| | (SEQ ID NO: |
| | 1888) |
| AL2p-9, AL2p-16, AL2p-36, | ARLLRNQPGASYAMDY |
| AL2p-38, AL2p-39, AL2p-40, | (SEQ ID NO: |
| AL2p-41, AL2p-42, AL2p-43, | 1889) |
| and AL2p-44 | |
| AL2p-35 | ARLLRNQPGESYAHDY |
| | (SEQ ID NO: |
| | 1890) |
| Formula III | ARLLRNX₁PGX₂ |
| | SYAX₃DY |
| | X₁ is Q or K |
| | X₂ is E, S, or A |
| | X₃ is M or H |
| | (SEQ ID NO: |
| | 1830) |

TABLE E4
Light chain HVR LI sequences of
anti-TREM2 antibodies

| Ab | HVR L1 |
|---|---|
| AL2p-h50, AL2p-2, AL2p-3, | RSSQSLVHSNGYTYLH |
| AL2p-4, AL2p-10, AL2p-12, | (SEQ ID NO: |
| AL2p-31, AL2p-32, AL2p-h77, | 1837) |
| AL2p-35, AL2p-36. and | |
| AL2p-37 | |
| AL2p-45, AL2p-47, AL2p-50. | RTSQSLVHSNAYTYLH |
| AL2p-52, AL2p-55, and | (SEQ ID NO: |
| AL2p-56 | 1846) |
| AL2p-61 and AL2p-62 | RSSQSLVHSNQYTYLH |
| | (SEQ ID NO: 1849 |
| AL2p-5, AL2p-58, and | RSSQSLVHSNRYTYLH |
| AL2p-60 | (SEQ ID NO: |
| | 1851) |
| AL2p-6 | RSSQSLVHSNWYTYLH |
| | (SEQ ID NO: |
| | 1891) |
| AL2p-7, AL2p-8, AL2p-13, | RSSQSLIHSNGYTYLH |
| and AL2p-26 | (SEQ ID NO: |
| | 1892) |
| AL2p-9, AL2p-16, AL2p-18. | RTSQSLVHSNGYTYLH |
| AL2p-20, AL2p-23, AL2p-25, | (SEQ ID NO: |
| AL2p-28, and AL2p-33 | 1893) |
| AL2p-11, AL2p-14, AL2p-17, | RSSRSLVHSNGYTYLH |
| AL2p-19, AL2p-22, AL2p-24, | (SEQ ID NO: |
| AL2p-27. and AL2p-29 | 1894) |
| AL2p-15, AL2p-21, and | RSSSSLVHSNGYTYLH |
| AL2p-30 | (SEQ ID NO: |
| | 1895) |
| AL2p-38 and AL2p-43 | RSSRSLVHSNRYTYLH |
| | (SEQ ID NO: |
| | 1896) |
| AL2p-39 and AL2p-41 | RSSRSLVHSNQYTYLH |
| | (SEQ ID NO: |
| | 1897) |
| AL2p-40, AL2p-42, and | RTSRSLVHSNRYTYLH |
| AL2p-44 | (SEQ ID NO: |
| | 1898) |
| AL2p-46, AL2p-48, AL2p-49, | RTSQSLVHSNQYTYLH |
| AL2p-51, AL2p-53, AL2p-54, | (SEQ ID NO: |
| AL2p-57, and AL2p-59 | 1899) |
| Formula IV | RX₁SX₂SLX₃HSNX₄ |
| | YTYLH |
| | X₁ is S or T |
| | X₂ is Q, R, or S |
| | X₃ is V or I |
| | X₄ is G, R, W, Q |
| | or A |
| | (SEQ ID NO: |
| | 1834) |

TABLE E5
Light chain HVR L2 sequences of
anti-TREM2 antibodies

| Ab | HVR L2 |
|---|---|
| AL2p-h50, AL2p-2, AL2p-3, | KVSNRFS |
| AL2p-4, AL2p-5, AL2p-6, | (SEQ ID |
| AL2p-14, AL2p-24, AL2p-29, | NO: 1838) |
| AL2p-h77, AL2p-35, AL2p-36, | |
| AL2p-37, AL2p-58, and | |
| AL2p-62 | |
| AL2p-7, AL2p 8, AL2p 10, | KVSNRRS |
| AL2p 12, AL2p-13, AL2p 22, | (SEQ ID |
| AL2p-26, AL2p-31, AL2p-32, | NO: 1841) |
| AL2p38, AL2p39. AL2p-40, | |
| AL2p-41, AL2p-42, AL2p-43, | |
| AL2p-44, AL2p-60, and | |
| AL2p-61 | |
| AL2p-9, AL2p-11, AL2p-16, | KVSNRVS |
| AL2p-17, AL2p-18, AL2p-19, | (SEQ ID |
| AL2p-20, AL2p-23, AL2p-25, | NO: 1847) |
| AL2p-27, AL2p-28, AL2p-33, | |
| AL2p-45, AL2p-46, AL2p-47, | |
| AL2p-48, AL2p-49, AL2p-50, | |
| AL2p-51, AL2p-52, AL2p-53, | |
| AL2p-54, AL2p-55, AL2p-56, | |
| AL2p-57, and AL2p-59 | |
| AL2p-15, AL2p-21, and | KVSNRKS |
| AL2p-30 | (SEQ ID |
| | NO: 1900) |
| Formula V | KVSNRX₁S |
| | X₁ is F, |
| | R, V, or |
| | K |
| | (SEQ ID |
| | NO: 1835) |

TABLE E6
Light chain HVR L3 sequences of
anti-TR FM2 antibodies

| Ab | HVR L3 |
|---|---|
| AL2p-h50, AL2p-2, AL2p-3, | SQSTRVPYT |
| AL2p-4, AL2p-5, AL2p-6, | (SEQ ID |
| AL2p-7, AL2p-8, AL2p-9, | NO: 1836) |
| AL2p-10, AL2p-11, AL2p-12, | |
| AL2p-13, AL2p-14, AL2p-15, | |
| AL2p-16, AL2p-17, AL2p-18, | |
| AL2p-19, AL2p-20, AL2p-21, | |
| AL2p-22, AL2p-23, AL2p-24, | |
| AT2p-25, AL2p-26, AL2p-27, | |
| AL2p-28, AL2p-29, AL2p-30, | |
| AL2p-31, AL2p-32, AL2p-33, | |
| AL2p-h77, AL2p-35, AL2p-36, | |
| AL2p-37, AL2p-38, AL2p-39, | |
| AL2p-40, AL2p-41, AL2p-42, | |
| AL2p-43, AL2p-44, AL2p-45, | |
| AL2p-46, AL2p-47, AL2p-48, | |
| AL2p-49, AL2p-50, AL2p-51, | |
| AL2p-52, AL2p-53, AL2p-54, | |
| AL2p-55, AL2p-56, AL2p-57, | |
| AL2p-58, AL2p-59, AL2p-60, | |
| AL2p-61, and AL2p-62 | |

TABLE E7
Heavy chain framework I sequences of
anti-TREM2 antibodies

| Ab | VH FR1 |
|---|---|
| AL2p-h50, AL2p-2, AL2p-3, | QVQLVQSGAE |
| AL2p-4, AL2p-5, AL2p-6, | VKKPGSSVKV |
| AL2p-7, AL2p-8, AL2p-9, | SCKASG |
| AL2p-10, AL2p-11, AL2p-12, | (SEQ ID |
| AL2p-13, AL2p-14, AL2p-15, | NO: 1716) |
| AL2p-16, AL2p-17, AL2p-18, | |
| AL2p-19, AL2p-20, AL2p-21, | |
| AL2p-22, AL2p-23, AL2p-24, | |
| AL2p-25, AL2p-26, AL2p-27, | |
| AL2p-28, AL2p-29, AL2p-30, | |
| AL2p-31, AL2p-32, AL2p-38, | |
| AL2p-39, AL2p-40, AL2p-41, | |
| AL2p-42, AL2p-43, AL2p-44, | |
| AL2p-45, AL2p-46, AL2p-47, | |
| AL2p-48, AL2p-50, AL2p-51, | |
| AL2p-54, AL2p-59, AL2p-60, | |
| and AL2p-61 | |
| AL2p-33. AL2p-49, AL2p-52, | EVQLVQSGAE |
| AL2p-53, AL2p-55, AL2p-56, | VKKPGSSVKV |
| and AL2p-57 | SCKASG |
| | (SEQ ID |
| | NO: 1717) |
| AL2p-h77, AL2p-35, AL2p-36, | QVQLVQSGAE |
| AL2p-37. AL2p-58. and AL2p-62 | VKKPGASVKV |
| | SCKASG |
| | (SEQ ID |
| | NO: 1718) |

TABLE E8
Heavy chain framework 2 sequences of
anti-TREM2 antibodies

| Ab | VH FR2 |
|---|---|
| AL2p-h50, AL2p-2, AL2p-3, AL2p-4, | WVRQAPGQGL |
| AL2p-5, AL2p-6, AL2p-7, AL2p-8, | EWMG |
| AL2p-9, AL2p-10, AL2p-11, AL2p-12, | (SEQ ID |
| AL2p-13, AL2p-14, AL2p-15, AL2p-16, | NO: 1719) |
| AL2p-17, AL2p-18, AL2p-19, AL2p-20, | |
| AL2p-21, AL2p-22, AL2p-23, AL2p-24, | |
| AL2p-25, AL2p-26, AL2p-27, AL2p-28, | |
| AL2p-29, AL2p-30, AL2p-31, AL2p-32, | |
| AL2p-33, AL2p-38, AL2p-39, AL2p-40, | |
| AL2p-41, AL2p-42, AL2p-43, AL2p-44, | |
| AL2p-45, AL2p-46, AL2p-47, AL2p48, | |
| AL2p-49, AL2p-50, AL2p-51, AL2p-52, | |
| AL2p-53, AL2p-54, AL2p-55, AL2p-56, | |
| AL2p-57, AL2p-59, AL2p-60, and | |
| AL2p-61 | |
| AL2p-h77, AL2p-35, AL2p-36, | WVRQAPGQRL |
| AL2p-37, AL2p-58, and AL2-62 | EWIG |
| | (SEQ ID |
| | NO: 1720) |

TABLE E9
Heavy chain framework 3 sequences of
anti-TREM2 antibodies

| Ab | VH FR3 |
|---|---|
| AL2p-h50, AL2p-2, AL2p-3. AL2p-4, | RVTITADEST |
| AL2p-5, AL2p-6, AL2p-7, AL2p-8, | STAYMELSSL |
| AL2p-9, AL2p-10, AL2p-11, AL2p-12, | RSEDTAVYYC |
| AL2p-13, AL2p-14, AL2p-15, AL2p-16, | (SEQ ID |
| AL2p-17, AL2p-18, AL2p-19, AL2p-20, | NO: 1721) |
| AL2p-21, AL2p-22, AL2p-23, AL2p-24, | |
| AL2p-25, AL2p-26, AL2p-27, AL2p-28, | |
| AL2p-29, AL2p-30, AL2p-31, AL2p-32, | |
| AL2p-33, AL2p-38, AL2p-39, AL2p-40, | |
| AL2p-41, AL2p-42, AL2p-43, AL2p-44, | |
| AL2p-45, AL2p-46, AL2p-47, AL2p-48, | |
| AL2p-49, AL2p-50, AL2p-51, AL2p-52, | |
| AL2p-53, AL2p-54, AL2p-55, AL2p-56, | |
| AL2p-57, AL2p-59, AL2p-60, and | |
| AL2p-61 | |
| AL2p-h77, AL2p-35, AL2p-36, AL2p-37- | RVTITADTSA |
| AL2p-58, and AL2p-62 | STAYMELSSL |
| | RSEDTAVYYC |
| | (SEQ ID |
| | NO: 1722) |

TABLE E10
Heavy chain framework 4 sequences of
anti-TREM2 antibodies

| Ab | VH FR4 |
|---|---|
| AL2p-h50, AL2p-2, AL2p-3, AL2p-4, | WGQGTLV |
| AL2p-5, AL2p-6, AL2p-7, AL2p-8, | TVSS |
| AL2p-9, AL2p-10, AL2p-11, AL2p-12, | (SEQ ID |
| AL2p-13, AL2p-14, AL2p-15, AL2p-16, | NO: |
| AL2p-17, AL2p-18, AL2p-19, AL2p-20, | 1723) |
| AL2p-21, AL2p-22, AL2p-23, AL2p-24, | |
| AL2p-25, AL2p-26, AL2p-27, AL2p-28, | |
| AL2p-29, AL2p-30, AL2p-31, AL2p-32, | |
| AL2p-33, AL2p-h77, AL2p-35, AL2p-36, | |
| AL2p-37, AL2p-38, AL2p-39, AL2p-40, | |
| AL2p-41, AL2p-42, AL2p-43, AL2p-44, | |
| AL2p-45, AL2p-46, AL2p-47, AL2p-48, | |
| AL2p-49, AL2p-50, AL2p-51, AL2p-52, | |
| AL2p-53, AL2p-54, AL2p-55, AL2p-56, | |
| AL2p-57, AL2p-58, AL2p-59, AL2p-60. | |
| AL2p-61, and AL2p-62 | |

TABLE E11
Light chain framework 1 sequences of
anti-TREM2 antibodies

| Ab | VL FR1 |
|---|---|
| AL2p-h50, AL2p-2, AL2p-3, AL2p-4, | DVVMTQTPLS |
| AL2p-5, AL2p-6, AL2p-11, AL2p-17, | LSVTPGQPAS |
| AL2p-19, AL2p-45, AL2p-46, AL2p-47, | ISC |
| AL2p-48, AL2p-49, AL2p-50, AL2p-51, | (SEQ ID |
| AL2p-52, AL2p-53, AL2p-54, AL2p-55, | NO: 1724) |
| AL2p-56, and AL2p-57 | |
| AL2p-7, AL2p-8, AL2p-9, AL2p-10, | GVVMTQTPLS |
| AL2p-12, AL2p-13, AL2p-14, AL2p-15, | LSVTPGQPAS |
| AL2p-16, AL2p-18, AL2p-20, AL2p-21, | ISC |
| AL2p-22, AL2p-23, AL2p-24, AL2p-25, | (SEQ ID |
| AL2p-26, AL2p-27, AL2p-28, AL2p-29, | NO: 1725) |
| AL2p-30, AL2p-31, AL2p-32, AL2p-38, | |
| AL2p-39, AL2p-40, AL2p-41, AL2p-42, | |
| AL2p-43, AL2p-44, AL2p-59, AL2p-60, | |
| and AL2p-61 | |
| AL2p-33 | GVVMAQTPLS |
| | LSVTPGQPAS |
| | ISC |
| | (SEQ ID |
| | NO: 1726 |
| AL2p-h77, AL2p-35, AL2p-36, AL2p-37, | DVVMTQSPDS |
| AL2p-58, and AL2p-62 | LAVSLGERAT |
| | INC |
| | (SEQ ID |
| | NO: 1727) |

TABLE E12
Light chain framework 2 sequences of
anti-TREM2 antibodies

| Ab | VL FR2 |
|---|---|
| AL2p-h50, AL2p-2, AL2p-3, AL2p-4, | WYLQKPGQSP |
| AL2p-5, AL2p-6, AL2p-7, AL2p-8, | QLLIY |
| AL2p-9, AL2p-10, AL2p-11, AL2p-12, | (SEQ ID |
| AL2p-13, AL2p-14, AL2p-15, AL2p-16, | NO: 1728) |
| AL2p-17, AL2p-18, AL2p-19, AL2p-20, | |
| AL2p-21, AL2p-22, AL2p-23, AL2p-24, | |
| AL2p-25, AL2p-26, AL2p-27, AL2p-28, | |
| AL2p-29, AL2p-30, AL2p-31, AL2p-32, | |
| AL2p-33, AL2p-38, AL2p-39, AL2p-40, | |
| AL2p-41, AL2p-42, AL2p-43, AL2p-44, | |
| AL2p-45, AL2p-46, AL2p-47, AL2p-48, | |
| AL2p-49, AL2p-50, AL2p-51, AL2p-52, | |
| AL2p-53, AL2p-54, AL2p-55, AL2p-56, | |
| AL2p-57, AL2p-59, AL2p-60 and AL2p-61 | |
| AL2p-h77, AL2p-35, AL2p-36, AL2p-37, | WYQQKPGQSP |
| AL2p-58, and AL2p-62 | KLLIY |
| | (SEQ ID |
| | NO: 1729) |

TABLE E13
Light chain framework 3 sequences of
anti-TREM2 antibodies

| Ab | VL FR3 |
|---|---|
| AL2p-h50, AL2p-2, AL2p-3, AL2p-4, | GVPDRFSG |
| AL2p-5, AL2p-6, AL2p-7, AL2p-8, | SGSGTDFT |
| AL2p-9, AL2p-10, AL2p-11. AL2p-12, | LKISRVEA |
| AL2p-13, AL2p-14, AL2p-15, AL2p-16, | EDVGVYYC |
| AL2p-17, AL2p-18, AL2p-19, AL2p-20, | (SEQ ID |
| AL2p-21, AL2p-22, AL2p-23, AL2p-24, | NO: 1730) |
| AL2p-25, AL2p-26, AL2p-27, AL2p-28, | |
| AL2p-29, AL2p-30, AL2p-31, AL2p-32, | |
| AL2p-33, AL2p-38, AL2p-39, AL2p-40, | |
| AL2p-41, AL2p-42, AL2p-43, AL2p-44, | |
| AL2p-45, AL2p-46, AL2p-47, AL2p-48, | |
| AL2p-49, AL2p-50, AL2p-51. AL2p-52, | |
| AL2p-53, AL2p-54, AL2p-55, AL2p-56, | |
| AL2p-57, AL2p-58, AL2p-59, AL2p-60, | |
| and AL2p-61 | |
| AL2p-h77, AL2p-35, AL2p-36, AL2p-37, | GVPDRFSGS |
| and AL2-67 | GSGTDFTLT |
| | ISSLQAEDV |
| | AVYYC |
| | (SEQ ID |
| | NO: 1731) |

TABLE E14
Light chain framework 4 sequences of
anti-TREM2 antibodies

| Ab | VL FR4 |
|---|---|
| AL2p-h50, AL2p-2, AL2p-3, AL2p-4, | FGQGTKLEIK |
| AL2p-5. AT 2p-6. AL2p-7, AL2p-8, | (SEQ ID |
| AL2p-9, AL2p-10, AL2p-11, AL2p-12, | NO: 1732) |
| AL2p-13, AL2p-14, AL2p-15, AL2p-16, | |
| AL2p-17, AL2p-18, AL2p-19, AL2p-20, | |
| AL2p-21, AL2p-22, AL2p-23, AL2p-24, | |
| AL2p-25, AL2p-26, AL2p-27, AL2p-28, | |
| AL2p-29, AL2p-30, AL2p-31, AL2p-32, | |
| AL2p-33, AL2p-38, AL2p-39, AL2p-40, | |
| AL2p-41, AL2p-42, AL2p-43, AL2p-44, | |
| AL2p-45, AL2p-46, AL2p-47, AL2p-48, | |
| AL2p-49, AL2p-50, AL2p-51, AL2p-52, | |
| AL2p-53, AL2p-54, AL2p-55, AL2p-56, | |
| AL2p-57, AL2p-58, AL2p-59, AL2p-60, | |
| and AL2p-61 | |
| AL2p-h77. AL2p-35, AL2p-36, | FGGGTKVEIK |
| AL2p-37, and AL2p-62 | (SEQ ID |
| | NO: 1733 |

TABLE E15
Heavy chain variable region sequences of anti-TREM2 antibodies

| Ab | HCVR |
|---|---|
| AL2p-h50. AL2p-5, | QVQLVQSGAEVKKPGSSVKVSCKASGYAFSSSWMNWVRQAPGQGL |
| and AL2p-6 | EWMGRIYPGDGDTNYAQKFQGRVTITADESTSTAYMELSSLRSEDTA |
| | VYYCARLLRNQPGESYAMDYWGQGTLVTVSS (SEQ ID NO: 1734) |
| AL2p-2 | QVQLVQSGAEVKKPGSSVKVSCKASGYAFSSSWMNWVRQAPGQGLE |
| | WMGRIYPGGGDTNYAQKFQGRVTITADESTSTAYMELSSLRSEDTAV |
| | YYCARLLRNQPGESYAMDYWGQGTLVTVSS (SEQ ID NO: 1735) |
| AL2p-3 | QVQLVQSGAEVKKPGSSVKVSCKASGYAFSSSWMNWVRQAPGQGL |
| | EWMGRIYPGEGDTNYAQKFQGRVTITADESTSTAYMELSSLRSEDTA |
| | VYYCARLLRNQPGESYAMDYWGQGTLVTVSS (SEQ ID NO: 1736) |
| AL2p-4 | QVQLVQSGAEVKKPGSSVKVSCKASGYAFSSSWMNWVRQAPGQGL |
| | EWMGRIYPGQGDTNYAQKFQGRVTITADESTSTAYMELSSLRSEDTA |
| | VYYCARLLRNQPGESYAMDYWGQGTLVTVSS (SEQ ID NO: 1737 |
| AL2p-7 | QVQLVQSGAEVKKPGSSVKVSCKASGYAFSLSWMNWVRQAPGQGL |
| | EWMGRIYPGDGDTNYAQKFRGRVTITADESTSTAYMELSSLRSEDTA |
| | VYYCARLLRNQPGESYAMDYWGQGTLVTVSS (SEQ ID NO: 1738) |
| AL2p-8 | QVQLVQSGAEVKKPGSSVKVSCKASGYAFSLSWMNWVRQAPGQGL |
| | EWMGRIYPGDGDTNYARKFQGRVTITADESTSTAYMELSSLRSEDTA |
| | VYYCARLLRNQPGSSYAMDYWGQGTLVTVSS (SEQ ID NO: 1739) |
| AL2p-9 | QVQLVQSGAEVKKPGSSVKVSCKASGYAFSRSWMNWVRQAPGQGL |
| | EWMGRIYPGDGDTNYAQKFQGRVTITADESTSTAYMELSSLRSEDTA |
| | VYYCARLLRNQPGASYAMDYWGQGTLVTVSS (SEQ ID NO: 1740) |
| AL2p-10 | QVQLVQSGAEVKKPGSSVKVSCKASGYAFSSDWMNWVRQAPGQGL |
| | EWMGRIYPGDGDTNYAQKFQGRVTITADESTSTAYMELSSLRSEDTA |
| | VYYCARLLRNQPGESYAMDYWGQGTLVTVSS (SEQ ID NO: 1741) |
| AL2p-11 | QVQLVQSGAEVKKPGSSVKVSCKASGYAFSSDWMNWVRQAPGQGL |
| | EWMGRIYPGDGDTNYARKFQGRVTITADESTSTAYMELSSLRSEDTA |
| | VYYCARLLRNQPGESYAMDYWGQGTLVTVSS (SEQ ID NO: 1742) |
| AL2p-12 | QVQLVQSGAEVKKPGSSVKVSCKASGYAFSSHWMNWVRQAPGQGL |
| | EWMGRIYPGDGDTNYAHKFQGRVTITADESTSTAYMELSSLRSEDTA |
| | VYYCARLLRNQPGESYAMDYWGQGTLVTVSS (SEQ ID NO: 1743) |
| AL2p-13 | QVQLVQSGAEVKKPGSSVKVSCKASGYAFSSHWMNWVRQAPGQGL |
| | EWMGRIYPGDGDTNYAQKFKGRVTITADESTSTAYMELSSLRSEDTA |
| | VYYCARLLRNQPGESYAMDYWGQGTLVTVSS (SEQ ID NO: 1744) |
| AL2p-14 and AL2p-15 | QVQLVQSGAEVKKPGSSVKVSCKASGYAFSSHWMNWVRQAPGQGL |
| | EWMGRIYPGDGDTNYAQKFQGRVTITADESTSTAYMELSSLRSEDTA |
| | VYYCARLLRNQPGESYAMDYWGQGTLVTVSS (SEQ ID NO: 1745) |
| AL2p-I6 | QVQLVQSGAEVKKPGSSVKVSCKASGYAFSSHWMNWVRQAPGQGL |
| | EWMGRIYPGDGDTNYAQKFRGRVTITADESTSTAYMELSSLRSEDTA |
| | VYYCARLLRNQPGASYAMDYWGQGTLVTVSS (SEQ ID NO: 1746) |
| AL2p-17 | QVQLVQSGAEVKKPGSSVKVSCKASGYAFSSHWMNWVRQAPGQGL |
| | EWMGRIYPGDGDTNYAQKRQGRVTITADESTSTAYMELSSLRSEDTA |
| | VYYCARLLRNQPGESYAMDYWGQGTLVTVSS (SEQ ID NO: 1747) |
| AL2p-18 | QVQLVQSGAEVKKPGSSVKVSCKASGYAFSSHWMNWVRQAPGQGL |
| | EWMGRIYPGDGDTNYAQKWQGRVTITADESTSTAYMELSSLRSEDT |
| | AVYYCARLLRNQPGSSYAMDYWGQGTLVTVSS (SEQ ID NO: 1748) |
| AL2p-19 and AL2p-20 | QVQLVQSGAEVKKPGSSVKVSCKASGYAFSSHWMNWVRQAPGQGL |
| | EWMGRIYPGDGDTNYARKFQGRVTITADESTSTAYMELSSLRSEDTA |
| | VYYCARLLRNQPGESYAMDYWGQGTLVTVSS (SEQ ID NO: 1749) |
| AL2p-21 | QVQLVQSGAEVKKPGSSVKVSCKASGYAFSSHWMNWVRQAPGQGL |
| | EWMGRIYPGDGDTNYAWKFQGRVTITADESTSTAYMELSSLRSEDT |
| | AVYYCARLLRNQPGESYAMDYWGQGTLVTVSS (SEQ ID NO: 1750) |
| AL2p-22 | QVQLVQSGAEVKKPGSSVKVSCKASGYAFSSHWMNWVRQAPGQGL |
| | EWMGRIYPGDGDTNYAYKFQGRVTITADESTSTAYMELSSLRSEDTA |
| | VYYCARLLRNQPGESYAMDYWGQGTLVTVSS (SEQ ID NO: 1751) |
| AL2p-23 | QVQLVQSGAEVKKPGSSVKVSCKASGYAFSSHWMNWVRQAPGQGL |
| | EWMGRIYPGDGQTNYAQKRQGRVTITADESTSTAYMELSSLRSEDTA |
| | VYYCARLLRNQPGESYAMDYWGQGTLVTVSS (SEQ ID NO: 1752) |
| AL2p-24 | QVQLVQSGAEVKKPGSSVKVSCKASGYAFSSHWMNWVRQAPGQGL |
| | EWMGRIYPGGGDTNYAQKFQGRVTITADESTSTAYMELSSLRSEDTA |
| | VYYCARLLRNQPGESYAMDYWGQGTLVTVSS (SEQ ID NO: 1753 |
| AL2p-25 | QVQLVQSGAEVKKPGSSVKVSCKASGYAFSSHWMNWVRQAPGQGL |
| | EWMGRIYPGGGDTNYAQKFRGRVTITADESTSTAYMELSSLRSEDTA |
| | VYYCARLLRNQPGESYAMDYWGQGTLVTVSS (SEQ ID NO: 1754) |
| AL2p-26 | QVQLVQSGAEVKKPGSSVKVSCKASGYAFSSHWMNWVRQAPGQGL |
| | EWMGRIYPGGGDTNYAQKRQGRVTITADESTSTAYMELSSLRSEDTA |
| | VYYCARLLRNQPGESYAMDYWGQGTLVTVSS (SEQ ID NO: 1755) |
| AL2p-27 | QVQLVQSGAEVKKPGSSVKVSCKASGYAFSSHWMNWVRQAPGQGL |
| | EWMGRIYPGQGDTNYAQKFQGRVTITADESTSTAYMELSSLRSEDTA |
| | VYYCARLLRNQPGESYAMDYWGQGTLVTVSS (SEQ ID NO: 1756) |
| AL2p-28 | QVQLVQSGAEVKKPGSSVKVSCKASGYAFSSHWMNWVRQAPGQGL |
| | EWMGRIYPGVGDTNYAQKFQGRVTITADESTSTAYMELSSLRSEDTA |
| | VYYCARLLRNQPGESYAMDYWGQGTLVTVSS (SEQ ID NO: 1757) |
| AL2p-29 | QVQLVQSGAEVKKPGSSVKVSCKASGYAFSSQWMNWVRQAPGQGL |
| | EWMGRIYPGDGDTNYAQKFQGRVTITADESTSTAYMELSSLRSEDTA |
| | VYYCARLLRNQPGESYAMDYWGQGTLVTVSS (SEQ ID NO: 1758) |
| AL2p-30 | QVQLVQSGAEVKKPGSSVKVSCKASGYAFSSQWMNWVRQAPGQGL |
| | EWMGRIYPGDGDTNYAWKFQGRVTITADESTSTAYMELSSLRSEDT |
| | AVYYCARLLRNQPGESYAMDYWGQGTLVTVSS (SEQ ID NO: 1759) |
| AL2p-31, AL2p-60, | QVQLVQSGAEVKKPGSSVKVSCKASGYAFSSQWMNWVRQAPGQGL |
| and AL2p-h31 | EWMGRIYPGGGDTNYARKFQGRVTITADESTSTAYMELSSLRSEDTA |
| | VYYCARLLRNQPGESYAMDYWGQGTLVTVSS (SEQ ID NO: 1760) |
| AL2p-32 | QVQLVQSGAEVKKPGSSVKVSCKASGYAFSSEWMNWVRQAPGQGL |
| | EWMGRIYPGDGDTNYAQKFQGRVTITADESTSTAYMELSSLRSEDTA |
| | VYYCARLLRNQPGESYAMDYWGQGTLVTVSS (SEQ ID NO: 1761) |
| AL2p-33 | EVQLVQSGAEVKKPGSSVKVSCKASGYAFSSSWMNWVRQAPGQGL |
| | EWMGRIYPGDGDTNYAQKFQGRVTITADESTSTAYMELSSLRSEDTA |
| | VYYCARLLRNQPGESYAMDYWGQGTLVTVSS (SEQ ID NO: 1762) |
| AL2p-h77, AL2p-h26, | QVQLVQSGAEVKKPGASVKVSCKASGYAFSSSWMNWVRQAPGQRL |
| and AL2p-h90 | EWIGRIYPGDGDTNYAQKFQGRVTITADTSASTAYMELSSLRSEDTA |
| | VYYCARLLRNQPGESYAMDYWGQGTLVTVSS (SEQ ID NO: 1763) |
| AL2p-35 | QVQLVQSGAEVKKPGASVKVSCKASGYAFWSSWMNWVRQAPGQR |
| | LEWIGRIYPGDGDTNYAQKFQGRVTITADTSASTAYMELSSLRSEDT |
| | AVYYCARLLRNQPGESYAHDYWGQGTLVTVSS (SEQ ID NO: 1764) |
| AL2p-36 | QVQLVQSGAEVKKPGASVKVSCKASGYAFSSSWMNWVRQAPGQRL |
| | EWIGRIYPGDGDTNYARKFQGRVTITADTSASTAYMELSSLRSEDTA |
| | VYYCARLLRNQPGASYAMDYWGQGTLVTVSS (SEQ ID NO: 1765) |
| AL2p-37 and AL2p-58 | QVQLVQSGAEVKKPGASVKVSCKASGYAFSSQWMNWVRQAPGQRL |
| | EWIGRIYPGGGDTNYAGKFQGRVTITADTSASTAYMELSSLRSEDTA |
| | VYYCARLLRNQPGESYAMDYWGQGTLVTVSS (SEQ ID NO: 1766) |
| AL2p-38, AL2p-39, | QVQLVQSGAEVKKPGSSVKVSCKASGYAFSSHWMNWVRQAPGQGL |
| and AL2p-40 | EWMGRIYPGGGDTNYAQKFRGRVTITADESTSTAYMELSSLRSEDTA |
| | VYYCARLLRNQPGASYAMDYWGQGTLVTVSS (SEQ ID NO: 1767) |
| AL2p-41 and AL2p-42 | QVQLVQSGAEVKKPGSSVKVSCKASGYAFSSHWMNWVRQAPGQGL |
| | EWMGRIYPGEGDTNYAQKFRGRVTITADESTSTAYMELSSLRSEDTA |
| | VYYCARLLRNQPGASYAMDYWGQGTLVTVSS (SEQ ID NO: 1768) |
| AL2p-43 and AL2p-44 | QVQLVQSGAEVKKPGSSVKVSCKASGYAFSSHWMNWVRQAPGQGL |
| | EWMGRIYPGGGDTNYARKFRGRVTITADESTSTAYMELSSLRSEDTA |
| | VYYCARLLRNQPGASYAMDYWGQGTLVTVSS (SEQ ID NO: 1769) |
| AL2p-45 and AL2p-46 | QVQLVQSGAEVKKPGSSVKVSCKASGYAFSSDWMNWVRQAPGQGL |
| | EWMGRIYPGEGDTNYARKFQGRVTITADESTSTAYMELSSLRSEDTA |
| | VYYCARLLRNKPGESYAMDYWGQGTLVTVSS (SEQ ID NO: 1770) |
| AL2p-47 and AL2p-48 | QVQLVQSGAEVKKPGSSVKVSCKASGYAFSSDWMNWVRQAPGQGL |
| | EWMGRIYPGEGDTNYARKFHGRVTITADESTSTAYMELSSLRSEDTA |
| | VYYCARLLRNKPGESYAMDYWGQGTLVTVSS (SEQ ID NO: 1771) |
| AL2p-49 | EVQLVQSGAEVKKPGSSVKVSCKASGYAFSSDWMNWVRQAPGQGL |
| | EWMGRIYPGEGDTNYARKFHGRVTITADESTSTAYMELSSLRSEDTA |
| | VYYCARLLRNKPGESYAMDYWGQGTLVTVSS (SEQ ID NO: 1772) |
| AL2p-50 and AL2p-51 | QVQLVQSGAEVKKPGSSVKVSCKASGYAFSSHWMNWVRQAPGQGL |
| | EWMGRIYPGEGDTNYAQKFHGRVTITADESTSTAYMELSSLRSEDTA |
| | VYYCARLLRNQPGESYAMDYWGQGTLVTVSS (SEQ ID NO: 1773) |
| AL2p-52 and AL2p-53 | EVQLVQSGAEVKKPGSSVKVSCKASGYAFSSHWMNWVRQAPGQGL |
| | EWMGRIYPGEGDTNYAQKFHGRVTITADESTSTAYMELSSLRSEDTA |
| | VYYCARLLRNQPGESYAMDYWGQGTLVTVSS (SEQ ID NO: 1774) |
| AL2p-54 | QVQLVQSGAEVKKPGSSVKVSCKASGYAFSSHWMNWVRQAPGQGL |
| | EWMGRIYPGEGDTNYAQKFHGRVTITADESTSTAYMELSSLRSEDTA |
| | VYYCARLLRNKPGESYAMDYWGQGTLVTVSS (SEQ ID NO: 1775) |
| AL2p-55, AL2p-56, | EVQLVQSGAEVKKPGSSVKVSCKASGYAFSSHWMNWVRQAPGQGL |
| and AL2p-57 | EWMGRIYPGEGDTNYAQKFHGRVTITADESTSTAYMELSSLRSEDTA |
| | VYYCARLLRNKPGESYAMDYWGQGTLVTVSS (SEQ ID NO: 1776) |
| AL2p-61 | QVQLVQSGAEVKKPGSSVKVSCKASGYAFSSQWMNWVRQAPGQGL |
| | EWMGRIYPGEGDTNYARKFQGRVTITADESTSTAYMELSSLRSEDTA |
| | VYYCARLLRNQPGESYAMDYWGQGTLVTVSS (SEQ ID NO: 1777) |
| AL2p-62 | QVQLVQSGAEVKKPGASVKVSCKASGYAFSSQWMNWVRQAPGQRL |
| | EWIGRIYPGEGDTNYAGKFQGRVTITADTSASTAYMELSSLRSEDTA |
| | VYYCARLLRNQPGESYAMDYWGQGTLVTVSS (SEQ ID NO: 1778) |
| AL2p-h19 and AL2p- | QVQLVQSGAEVKKPGSSVKVSCKASGYAFSSSWMNWVRQAPGQGL |
| h35 | EWMGRIYPGDGDTNYAQKFQGRATITADTSTSTAYMELSSLRSEDTA |
| | VYYCARLLRNQPGESYAMDYWGQGTLVTVSS (SEQ ID NO: 1779) |
| AL2p-h21 | QVQLVQSGAEVKKPGASVKVSCKASGYAFSSSWMNWVRQAPGQGL |
| | EWMGRIYPGDGDTNYAQKFQGRVTMTRDTSTSTVYMELSSLRSEDT |
| | AVYYCARLLRNQPGESYAMDYWGQGTLVTVSS (SEQ ID NO: 1780) |
| AL2p-h22 | QVQLVQSGAEVKKPGASVKVSCKASGYAFSSSWMNWVRQAPGQGL |
| | EWIGRIYPGDGDTNYAQKFQGRVTMTADTSTSTVYMELSSLRSEDTA |
| | VYYCARLLRNQPGESYAMDYWGQGTLVTVSS (SEQ ID NO: 1781) |
| AL2p-h23 | QVQLVQSGAEVKKPGASLKISCKASGYAFSSSWMNWVRQAPGQGLE |
| | WIGRIYPGDGDTNYAQKFQGRATLTADTSTSTAYMELSSLRSEDTAV |
| | YYCARLLRNQPGESYAMDYWGQGALVTVSS (SEQ ID NO: 1782) |
| AL2p-h24 | QVQLVQSGAEVVKPGASLKISCKASGYAFSSSWMNWVRQAPGQGLE |
| | WIGRIYPGDGDTNYNQKFQGRATLTADTSTSTAYMELSSLRSEDTAV |
| | YFCARLLRNQPGESYAMDYWGQGALVTVSS (SEQ ID NO: 1783) |
| AL2p-h25 | QVQLVQSGAEVKKPGASLKISCKASGYAFSSSWMNWVRQAPGQGLE |
| | WIGRIYPGDGDTNYNGEFRVRATLTADTSTSTAYMELSSLRSEDTAV |
| | YYCARLLRNQPGESYAMDYWGQGALVTVSS (SEQ ID NO: 1784) |
| AL2p-h27 | QVQLVQSGAEVKKPGASVKVSCKASGYAFSSSWMNWVRQAPGQGL |
| | EWIGRIYPGDGDTNYNGEFRVRATLTADTSTSTAYMELSSLRSEDTA |
| | VYFCARLLRNQPGESYAMDYWGQGTLVTVSS (SEQ ID NO: 1785) |
| AL2p-h28 | QVQLVQSGAEVKKPGASVKVSCKASGYAFSSSWMNWVRQAPGQGL |
| | EWIGRIYPGDGDTNYAQKFQGRATLTADTSTSTAYMELSSLRSEDTA |
| | VYFCARLLRNQPGESYAMDYWGQGTLVTVSS (SEQ ID NO: 1786) |
| AL2p-h29 | QVQLVQSGAEVKKPGASVKVSCKASGYAFSSSWMNWVRQAPGQGL |
| | EWIGRIYPGDGDTNYAQKFQGRATMTADTSTSTAYMELSSLRSEDTA |
| | VYYCARLLRNQPGESYAMDYWGQGTLVTVSS (SEQ ID NO: 1787) |
| AL2p-h30 | QVQLVQSGAEVKKPGASVKVSCKASGYAFSSSWMNWVRQAPGQGL |
| | EWMGRIYPGDGDTNYAQKFQGRVTMTADTSTSTAYMELSSLRSEDT |
| | AVYYCARLLRNQPGESYAMDYWGQGTLVTVSS (SEQ ID NO: 1788) |
| AL2p-h32 | QVQLVQSGAEVKKPGSSVKVSCKASGYAFSSSWMNWVRQAPGQGL |
| | EWIGRIYPGDGDTNYNGEFRVRATLTADTSTTTAYMELSSLRSEDTA |
| | VYFCARLLRNQPGESYAMDYWGQGTLVTVSS (SEQ ID NO: 1789) |
| AL2p-h33 | QVQLVQSGAEVKKPGSSVKVSCKASGYAFSSSWMNWVRQAPGQGL |
| | EWIGRIYPGDGDTNYAQKFQGRATLTADTSTTTAYMELSSLRSEDTA |
| | VYFCARLLRNQPGESYAMDYWGQGTLVTVSS (SEQ ID NO: 1790) |
| AL2p-h34 | QVQLVQSGAEVKKPGSSVKVSCKASGYAFSSSWMNWVRQAPGQGL |
| | EWIGRIYPGDGDTNYAQKFQGRATITADTSTSTAYMELSSLRSEDTA |
| | VYFCARLLRNQPGESYAMDYWGQGTLVTVSS (SEQ ID NO: 1791) |
| AL2p-b36 | EVQLLESGGGLVQPGGSLRLSCAASGYAFSSSWMNWVRQAPGKGLE |
| | WIGRIYPGDGDTNYAQKFQGRATISADTSKNTAYLQMNSLRAEDTA |
| | VYYCARLLRNQPGESYAMDYWGQGTLVTVSS (SEQ ID NO: 1792) |
| AL2p-h42 and AL2p- | QVQLVQSGAEVKKPGASVKVSCKASGYAFSSSWMNWVRQAPGQRL |
| h59 | EWMGRIYPGDGDTNYAQKFQGRVTITRDTSASTAYMELSSLRSEDTA |
| | VYYCARLLRNQPGESYAMDYWGQGTLVTVSS (SEQ ID NO: 1793) |
| AL2p-h43 | QVQLVQSGAEVKKPGASLKVSCKASGYAFSSSWMNWVRQAPGQRL |
| | EWIGRIYPGDGDTNYNGEFRVRATLTADTSASTAYMELSSLRSEDTA |
| | VYFCARLLRNQPGESYAMDYWGQGTLVTVSS (SEQ ID NO: 1794) |
| AL2p-h44 | QVQLVQSGAEVKKPGASLKVSCKASGYAFSSSWMNWVRQAPGQRL |
| | EWIGRIYPGDGDTNYAQKFQGRATLTADTSASTAYMELSSLRSEDTA |
| | VYFCARLLRNQPGESYAMDYWGQGTLVTVSS (SEQ ID NO: 1795) |
| AL2p-h47 | QVQLVQSGAEVKKPGASVKVSCKASGYAFSSSWMNWVRQAPGQGL |
| | EWMGRIYPGDGDTNYNGEFRVRVTMTRDTSTSTVYMELSSLRSEDT |
| | AVYYCARLLRNQPGESYAMDYWGQGTLVTVSS (SEQ ID NO: 1796) |
| AL2p-h76 | QVQLVQSGAEVKKPGASVKVSCKASGYAFSSSWMNWVRQAPGQRL |
| | EWIGRIYPGDGDTNYAQKFQGRATITADTSASTAYMELSSLRSEDTA |
| | VYFCARLLRNQPGESYAMDYWGQGTLVTVSS (SEQ ID NO: 1797) |
| AL2p-59 | QVQLVQSGAEVKKPGSSVKVSCKASGYAFSSHWMNWVRQAPGQGL |
| | EWMGRIYPGEGQTNYAQKRQGRVTITADESTSTAYMELSSLRSEDTA |
| | VYYCARLLRNQPGESYAMDYWGQGTLVTVSS (SEQ ID NO: 1798) |

TABLE E16
Heavy chain sequences of anti-TREM2 antibodies

| Ab | HC |
|---|---|
| AL2p-58 huIgG1 | QVQLVQSGAEVKKPGASVKVSCKASGYAFSSQWMNWVRQAPGQRLEWI |
| | GRIYPGGGDTNYAGKFQGRVTITADTSASTAYMELSSLRSEDTAVYYCAR |
| | LLRNQPGESYAMDYWGQGTLVTVSSASTKGPSVFPLAPSSKSTSGGTAAL |
| | GCLVKDYFPEPVTVSWNSGALTSGVHTFPAVLQSSGLYSLSSVVTVPSSSL |
| | GTQTYICNVNHKPSNTKVDKKVEPKSCDKTHTCPPCPAPELLGGPSVFLFP |
| | PKPKDTLMISRTPEVTCVVVDVSHEDPEVKFNWYVDGVEVHNAKTKPRE |
| | EQYNSTYRVVSVLTVLHQDWLNGKEYKCKVSNKALPAPIEKTISKAKGQP |
| | REPQVYTLPPSRDELTKNQVSLTCLVKGFYPSDIAVEWESNGQPENNYKT |
| | TPPVLDSDGSFFLYSKLTVDKSRWQQGNVFSCSVMHEALFINHYTQKSLSL |
| | SPGK (SEQ ID NO: 1905) |
| AL2p-58 huIgG1 | QVQLVQSGAEVKKPGASVKVSCKASGYAFSSQWMNWVRQAPGQRLEWI |
| | GRIYPGGGDTNYAGKFQGRVTITADTSASTAYMELSSLRSEDTAVYYCAR |
| | LLRNQPGESYAMDYWGQGTLVTVSSASTKGPSVFPLAPSSKSTSGGTAAL |
| | GCLVKDYFPEPVTVSWNSGALTSGVHTFPAVLQSSGLYSLSSVVTVPSSSL |
| | GTQTYICNVNHKPSNTKVDKKVEPKSCDKTHTCPPCPAPELLGGPSVFLFP |
| | PKPKDTLMISRTPEVTCVVVDVSHEDPEVDGVEVHNAKTKPRE |
| | EQYNSTYRVVSVLTVLHQDWLNGKEYKCKVSNKALPAPIEKTISKAKGQP |
| | REPQVYTLPPSRDELTKNQVSLTCLVKGFYPSDIAVEWESNGQPENNYKT |
| | TPPVLDSDGSFFLYSKLTVDKSRWQQGNVFSCSVMHEALFINHYTQKSLSL |
| | SPG (SEQ ID NO: 1906) |
| AL2p-58 huIgG1 PSEG | QVQLVQSGAEVKKPGASVKVSCKASGYAFSSQWMNWVRQAPGQRLEWI |
| | GRIYPGGGDTNYAGKFQGRVTITADTSASTAYMELSSLRSEDTAVYYCAR |
| | LLRNQPGESYAMDYWGQGTLVTVSSASTKGPSVFPLAPSSKSTSGGTAAL |
| | GCLVKDYFPEPVTVSWNSGALTSGVHTFPAVLQSSGLYSLSSVVTVPSSSL |
| | GTQTYICNVNHKPSNTKVDKKVEPKSCDKTHTCPPCPAPELLGGPSVFLFP |
| | PKPKDTLMISRTPEVTCVVVDVSHEDPEVKFNWYVDGVEVHNAKTKPRE |
| | EQYNSTYRVVSVLTVLHQDWLNGKEYKCKVSNKALPASIEKTISKAKGQP |
| | REPQVYTLPPSRDELTKNQVSLTCLVKGFYPSDIAVEWESNGQPENNYKT |
| | TPPVLD SDGSFFLYSKLTVDKSRWQQGNVFSCSVMHGALFINHYTQKSLSL |
| | SPGK (SEQ ID NO: 1907) |
| AL2p-58 huIgG1 PSEG | QVQLVQSGAEVKKPGASVKVSCKASGYAFSSQWMNWVRQAPGQRLEWI |
| | GRIYPGGGDTNYAGKFQGRVTITADTSASTAYMELSSLRSEDTAVYYCAR |
| | LLRNQPGESYAMDYWGQGTLVTVSSASTKGPSVFPLAPSSKSTSGGTAAL |
| | GCLVKDYFPEPVTVSWNSGALTSGVHTFPAVLQSSGLYSSSVVTVPSSSL |
| | GTQTYICNVNHKPSNTKVDKKVEPKSCDKTHTCPPCPAPELLGGPSVFLFP |
| | PKPKDTLMISRTPEVTCVVVDVSHEDPEVKFNWYVDGVEVHNAKTKPRE |
| | EQYNSTYRVVSVLTVLHQDWLNGKEYKCKVSNKALPASIEKTISKAKGQP |
| | REPQVYTLPPSRDELTKNQVSLTCLVKGFYPSDIAVEWESNGQPENNYKT |
| | TPPVLD SDGSFFLYSKLTVDKSRWQQGNVFSCSVMHGALHNHYTQKSLSL |
| | SPG (SEQ ID NO: 1908) |
| AL2p-47 huIgG1 | QVQLVQSGAEVKKPGSSVKVSCKASGYAFSSDWMNWVRQAPGQGLEW |
| | MGRIYPGEGDTNYARKFHGRVTITADESTSTAYMELSSLRSEDTAVYYCA |
| | RLLRNKPGESYAMDYWGQGTLVTVSSASTKGPSVFPLAPSSKSTSGGTAA |
| | LGCLVKDYFPEPVTVSWNSGALTSGVHTFPAVLQSSGLYSLSSVVTVPSSS |
| | LGTQTYICNVNHKPSNTKVDKKVEPKSCDKTHTCPPCPAPELLGGPSVFLF |
| | PPKPKDTLMISRTPEVTCVVVDVSHEDPEVKFNWYVDGVEVHNAKTKPR |
| | EEQYNSTYRVVSVLTVLHQDWLNGKEYKCKVSNKALPAPIEKTISKAKGQ |
| | PREPQVYTLPPSRDELTKNQVSLTCLVKGFYPSDIAVEWESNGQPENNYKT |
| | TPPVLDSDGSFFLYSKLTVDKSRWQQGNVFSCSVMHEALHNHYTQKSLSL |
| | SPGK (SEQ ID NO: 1909) |
| AL2p-47 hulgG1 | QVQLVQSGAEVKKPGSSVKVSCKASGYAFSSDWMNWVRQAPGQGLEW |
| | MGRIYPGEGDTNYARKFHGRVTITADESTSTAYMELSSLRSEDTAVYYCA |
| | RLLRNKPGESYAMDYWGQGTLVTVSSASTKGPSVFPLAPSSKSTSGGTAA |
| | LGCLVKDYFPEPVTVSWNSGALTSGVHTFPAVLQSSGLYSLSSVVTVPSSS |
| | LGTQTYICNVNHKPSNTKVDKKVEPKSCDKTHTCPPCPAPELLGGPSVFLF |
| | PPKPKDTLMISRTPEVTCVVVDVSHEDPEVKFNWYVDGVEVHNAKTKPR |
| | EEQYNSTYRVVSVLTVLHQDWLNGKEYKCKVSNKALPAPIEKTISKAKGQ |
| | PREPQVYTLPPSRDELTKNQVSLTCLVKGFYPSDIAVEWESNGQPENNYKT |
| | TPPVLD SDGSFFLYSKLTVDKSRWQQGNVFSCSVMHEALHNHYTQKSLSL |
| | SPG (SEQ ID NO: 1910) |
| AL2p-47 huIgG1 PSEG | QVQLVQSGAEVKKPGSSVKVSCKASGYAFSSDWMNWVRQAPGQGLEW |
| | MGRIYPGEGDTNYARKFHGRVTITADESTSTAYMELSSLRSEDTAVYYCA |
| | RLLRNKPGESYAMDYWGQGTLVTVSSASTKGPSVFPLAPSSKSTSGGTAA |
| | LGCLVKDYFPEPVTVSWNSGALTSGVHTFPAVLQSSGLYSLSSVVTVPSSS |
| | LGTQTYICNVNF1KPSNTKVDKKVEPKSCDKTHTCPPCPAPELLGGPSVFLF |
| | PPKPKDTLMISRTPEVTCVVVDVSHEDPEVKFNWYVDGVEVHNAKTKPR |
| | EEQYNSTYRVVSVLTVLHQDWLNGKEYKCKVSNKALPASIEKTISKAKGQ |
| | PREPQVYTLPPSRDELTKNQVSLTCLVKGFYPSDIAVEWESNGQPENNYKT |
| | TPPVLDSDGSFFLYSKLTVDKSRWQQGNVFSCSVMHGALFINHYTQKSLSL |
| | SPGK (SEQ ID NO: 1911) |
| AL2p-47 huIgG1 PSEG | QVQLVQSGAEVKKPGSSVKVSCKASGYAFSSDWMNWVRQAPGQGLEW |
| | MGRIYPGEGDTNYARKFHGRVTITADESTSTAYMELSSLRSEDTAVYYCA |
| | RLLRNKPGESYAMDYWGQGTLVTVSSASTKGPSVFPLAPSSKSTSGGTAA |
| | LGCLVKDYFPEPVTVSWNSGALTSGVHTFPAVLQSSGLYSLSSVVTVPSSS |
| | LGTQTYICNVNFIKPSNTKVDKKVEPKSCDKTHTCPPCPAPELLGGPSVFLF |
| | PPKPKDTLMISRTPEVTCVVVDVSHEDPEVKFNWYVDGVEVHNAKTKPR |
| | EEQYNSTYRVVSVLTVLHQDWLNGKEYKCKVSNKALPASIEKTISKAKGQ |
| | PREPQVYTLPPSRDELTKNQVSLTCLVKGFYPSDIAVEWESNGQPENNYKT |
| | TPPVLDSDGSFFLYSKLTVDKSRWQQGNVFSCSVMHGALFINHYTQKSLSL |
| | SPG (SEQ ID NO: 1912) |
| AL2p-61 hulgG1 | QVQLVQSGAEVKKPGSSVKVSCKASGYAFSSQWMNWVRQAPGQGLEW |
| | MGRIYPGEGDTNYARKFQGRVTITADESTSTAYMELSSLRSEDTAVYYCA |
| | RLLRNQPGESYAMDYWGQGTLVTVSSASTKGPSVFPLAPSSKSTSGGTAA |
| | LGCLVKDYFPEPVTVSWNSGALTSGVHTFPAVLQSSGLYSLSSVVTVPSSS |
| | LGTQTYICNVNHKPSNTKVDKKVEPKSCDKTHTCPPCPAPELLGGPSVFLFPPK |
| | PKDTLMISRTPEVCVVVDVSHEDPEVKFNWYVDGVEVHNAKTKPREEQYNS |
| | TYRVVSVLTVLHQDWLNGKEYKCKVSNKALPAPIEKTISKAKGQPREPQVYTL |
| | PPSRDELTKNQVSLTCLVKGFYPSDIAVEWESNGQPENNYKTTPPVLDSDGSFF |
| | LYSKLTVDKSRWQQGNVFSCSVMHEALHNHYTQKSLSLSPGK |
| | (SEQ ID NO: 1913) |
| AL2p-61 guIgG1 | QVQLVQSGAEVKKPGSSVKVSCKASGYAFSSQWMNWVRQAPGQGLEW |
| | MGRIYPGEGDTNYARKFQGRVTITADESTSTAYMELSSLRSEDTAVYYCA |
| | RLLRNQPGESYAMDYWGQGTLVTVSSASTKGPSVFPLAPSSKSTSGGTAA |
| | LGCLVKDYFPEPVTVSWNSGALTSGVHTFPAVLQSSGLYSLSSVVTVPSSS |
| | LGTQTYICNVNFIKPSNTKVDKKVEPKSCDKTHTCPPCPAPELLGGPSVFLF |
| | PPKPKDTLMISRTPEVTCVVVDVSHEDPEVKFNWYVDGVEVHNAKTKPR |
| | EEQYNSTYRVVSVLTVLHQDWLNGKEYKCKVSNKALPAPIEKTISKAKGQ |
| | PREPQVYTLPPSRDELTKNQVSLTCLVKGFYPSDIAVEWESNGQPENNYKT |
| | TPPVLDSDGSFFLYSKLTVDKSRWQQGNVFSCSVMHEALFINHYTQKSLSL |
| | SPG (SEQ ID NO: 1914) |
| AL2p-40 huIgG1 | QVQLVQSGAEVKKPGSSVKVSCKASGYAFSSHWMNWVRQAPGQGLEW |
| | MGRIYPGGGDTNYAQKFRGRVTITADESTSTAYMELSSLRSEDTAVYYCA |
| | RLLRNQPGASYAMDYWGQGTLVTVSSASTKGPSVFPLAPSSKSTSGGTAA |
| | LGCLVKDYFPEPVTVSWNSGALTSGVHTFPAVLQSSGLYSLSSVVTVPSSS |
| | LGTQTYICNVNHKPSNTKVDKKVEPKSCDKTHTCPPCPAPELLGGPSVFLF |
| | PPKPKDTLMISRTPEVTCVVVDVSHEDPEVKFNWYVDGVEVHNAKTKPR |
| | EEQYNSTYRVVSVLTVLHQDWLNGKEYKCKVSNKALPAPIEKTISKAKGQ |
| | PREPQVYTLPPSRDELTKNQVSLTCLVKGFYPSDIAVEWESNGQPENNYKT |
| | TPPVLDSDGSFFLYSKLTVDKSRWQQGNVFSCSVMHEALFINHYTQKSLSL |
| | SPGK (SEQ ID NO: 1915) |
| AL2p-40 huIgG1 | QVQLVQSGAEVKKPGSSVKVSCKASGYAFSSHWMNWVRQAPGQGLEW |
| | MGRIYPGGGDTNYAQKFRGRVTITADESTSTAYMELSSLRSEDTAVYYCA |
| | RLLRNQPGASYAMDYWGQGTLVTVSSASTKGPSVFPLAPSSKSTSGGTAA |
| | LGCLVKDYFPEPVTVSWNSGALTSGVHTFPAVLQSSGLYSLSSVVTVPSSS |
| | LGTQTYICNVNFIKPSNTKVDKKVEPKSCDKTHTCPPCPAPELLGGPSVFLF |
| | PPKPKDTLMISRTPEVTCVVVDVSHEDPEVKFNWYVDGVEVHNAKTKPR |
| | EEQYNSTYRVVSVLTVLHQDWLNGKEYKCKVSNKALPAPIEKTISKAKGQ |
| | PREPQVYTLPPSRDELTKNQVSLTCLVKGFYPSDIAVEWESNGQPENNYKT |
| | TPPVLDSDGSFFLYSKLTVDKSRWQQGNVFSCSVMHEALFINHYTQKSLSL |
| | SPG (SEQ ID NO: 1916) |
| AL2p-44 huIgG1 | QVQLVQSGAEVKKPGSSVKVSCKASGYAFSSHWMNWVRQAPGQGLEW |
| | MGRIYPGGGDTNYARKFRGRVTITADESTSTAYMELSSLRSEDTAVYYCA |
| | RLLRNQPGASYAMDYWGQGTLVTVSSASTKGPSVFPLAPSSKSTSGGTA |
| | ALGCLVKDYFPEPVTVSWNSGALTSGVHTFPAVLQSSGLYSLSSVVTVPS |
| | SSLGTQTYICNVNHKPSNTKVDKKVEPKSCDKTHTCPPCPAPELLGGPSVF |
| | LFPPKPKDTLMISRTPEVTCVVVDVSHEDPEVKFNWYVDGVEVHNAKTK |
| | PREEQYNSTYRVVSVLTVLHQDWLNGKEYKCKVSNKALPAPIEKTISKAK |
| | GQPREPQVYTLPPSRDELTKNQVSLTCLVKGFYPSDIAVEWESNGQPENN |
| | YKTTPPVLDSDGSFFLYSKLTVDKSRWQQGNVFSCSVMHEALFINHYTQK |
| | SLSLSPGK (SEQ ID NO: 1917) |
| AL2p-44 huIgG1 | QVQLVQSGAEVKKPGSSVKVSCKASGYAFSSHWMNWVRQAPGQGLEW |
| | MGRIYPGGGDTNYARKFRGRVTITADESTSTAYMELSSLRSEDTAVYYCA |
| | RLLRNQPGASYAMDYWGQGTLVTVSSASTKGPSVFPLAPSSKSTSGGTAA |
| | LGCLVKDYFPEPVTVSWNSGALTSGVHTFPAVLQSSGLYSLSSVVTVPSSS |
| | LGTQTYICNVNHKPSNTKVDKKVEPKSCDKTHTCPPCPAPELLGGPSVFLF |
| | PPKPKDTLMISRTPEVTCVVVDVSHEDPEVKFNWYVDGVEVHNAKTKPR |
| | EEQYNSTYRVVSVLTVLHQDWLNGKEYKCKVSNKALPAPIEKTISKAKGQ |
| | PREPQVYTLPPSRDELTKNQVSLTCLVKGFYPSDIAVEWESNGQPENNYKT |
| | TPPVLDSDGSFFLYSKLTVDKSRWQQGNVFSCSVMHEALFINHYTQKSLSL |
| | SPG (SEQ ID NO: 1918) |
| AL2p-41 huIgG1 | QVQLVQSGAEVKKPGSSVKVSCKASGYAFSSHWMNWVRQAPGQGLEW |
| | MGRIYPGEGDTNYAQKFRGRVTITADESTSTAYMELSSLRSEDTAVYYCA |
| | RLLRNQPGASYAMDYWGQGTLVTVSSASTKGPSVFPLAPSSKSTSGGTAA |
| | LGCLVKDYFPEPVTVSWNSGALTSGVHTFPAVLQSSGLYSLSSVVTVPSSS |
| | LGTQTYICNVNHKPSNTKVDKKVEPKSCDKTHTCPPCPAPELLGGPSVFLF |
| | PPKPKDTLMISRTPEVTCVVVDVSHEDPEVKFNWYVDGVEVHNAKTKPR |
| | EEQYNSTYRVVSVLTVLHQDWLNGKEYKCKVSNKALPAPIEKTISKAKGQ |
| | PREPQVYTLPPSRDELTKNQVSLTCLVKGFYPSDIAVEWESNGQPENNYKT |
| | TPPVLDSDGSFFLYSKLTVDKSRWQQGNVFSCSVMHEALFINHYTQKSLSL |
| | SPGK (SEQ ID NO: 1919) |
| AL2p-41 huIgG1 | QVQLVQSGAEVKKPGSSVKVSCKASGYAFSSHWMNWVRQAPGQGLEW |
| | MGRIYPGEGDTNYAQKFRGRVTITADESTSTAYMELSSLRSEDTAVYYCA |
| | RLLRNQPGASYAMDYWGQGTLVTVSSASTKGPSVFPLAPSSKSTSGGTAA |
| | LGCLVKDYFPEPVTVSWNSGALTSGVHTFPAVLQSSGLYSLSSVVTVPSSS |
| | LGTQTYICNVNHKPSNTKVDKKVEPKSCDKTHTCPPCPAPELLGGPSVFLF |
| | PPKPKDTLMISRTPEVTCVVVDVSHEDPEVKFNWYVDGVEVHNAKTKPR |
| | EEQYNSTYRVVSVLTVLHQDWLNGKEYKCKVSNKALPAPIEKTISKAKGQ |
| | PREPQVYTLPPSRDELTKNQVSLTCLVKGFYPSDIAVEWESNGQPENNYKT |
| | TPPVLDSDGSFFLYSKLTVDKSRWQQGNVFSCSVMHEALFINHYTQKSLSL |
| | SPG (SEQ ID NO: 1920) |

TABLE E17
Light chain variable region sequences of anti-TREM2 antibodies

| Ab | LCVR |
|---|---|
| AL2p-h50, AL2p-2, AL2p-3, AL2p- | DVVMTQTPLSLSVTPGQPASISCRSSQSLVHSNGYTYLHWYL |
| 4, AL2p-h42, AL2p-h43, AL2p-h44, | QKPGQSPQLLIYKVSNRFSGVPDRFSGSGSGTDFTLKISRVEA |
| and AL2p-h47 | EDVGVYYCSQSTRVPYTFGQGTKLEIK (SEQ ID NO: 1799) |
| AL2p-5 | DVVMTQTPLSLSVTPGQPASISCRSSQSLVHSNRYTYLHWYL |
| | QKPGQSPQLLIYKVSNRFSGVPDRFSGSGSGTDFTLKISRVEA |
| | EDVGVYYCSQSTRVPYTFGQGTKLEIK (SEQ ID NO: 1800) |
| AL2p-6 | DVVMTQTPLSLSVTPGQPASISCRSSQSLVHSNWYTYLHWYL |
| | QKPGQSPQLLIYKVSNRFSGVPDRFSGSGSGTDFTLKISRVEA |
| | EDVGVYYCSQSTRVPYTFGQGTKLEIK (SEQ ID NO: 1801) |
| AL2p-7, AL2p-8, AL2p-13, and | GVVMTQTPLSLSVTPGQPASISCRSSQSLIHSNGYTYLHWYL |
| AL2p-26 | QKPGQSPQLLIYKVSNRRSGVPDRFSGSGSGTDFTLKISRVEA |
| | EDVGVYYCSQSTRVPYTFGQGTKLEIK (SEQ ID NO: 1802) |
| AL2p-9, AL2p-16, AL2p-18, AL2p- | GVVMTQTPLSLSVTPGQPASISCRTSQSLVHSNGYTYLHWYL |
| 20, AL2p-23, AL2p-25, and AL2p- | QKPGQSPQLLIYKVSNRVSGVPDRFSGSGSGTDFTLKISRVEA |
| 28 | EDVGVYYCSQSTRVPYTFGQGTKLEIK (SEQ ID NO: 1803) |
| AL2p-10, AL2p-12, AL2p-31, and | GVVMTQTPLSLSVTPGQPASISCRSSQSLVHSNGYTYLHWYL |
| AL2p-32 | QKPGQSPQLLIYKVSNRRSGVPDRFSGSGSGTDFTLKISRVEA |
| | EDVGVYYCSQSTRVPYTFGQGTKLEIK (SEQ ID NO: 1804) |
| AL2p-11, AL2p-17, and AL2p-19 | DVVMTQTPLSLSVTPGQPASISCRSSRSLVHSNGYTYLHWYL |
| | QKPGQSPQLLIYKVSNRVSGVPDRFSGSGSGTDFTLKISRVEA |
| | EDVGVYYCSQSTRVPYTFGQGTKLEIK (SEQ ID NO: 1805) |
| AL2p-14, AL2p-24, and AL2p-29 | GVVMTQTPLSLSVTPGQPASISCRSSRSLVHSNGYTYLHWYL |
| | QKPGQSPQLLIYKVSNRFSGVPDRFSGSGSGTDFTLKISRVEAE |
| | DVGVYYCSQSTRVPYTFGQGTKLEIK (SEQ ID NO: 1806) |
| AL2p-15, AL2p-21, and AL2p-30 | GVVMTQTPLSLSVTPGQPASISCRSSSSLVHSNGYTYLHWYL |
| | QKPGQSPQLLIYKVSNRKSGVPDRFSGSGSGTDFTLKISRVEA |
| | EDVGVYYCSQSTRVPYTFGQGTKLEIK (SEQ ID NO: 1807) |
| AL2p-22 | GVVMTQTPLSLSVTPGQPASISCRSSRSLVHSNGYTYLHWYL |
| | QKPGQSPQLLIYKVSNRRSGVPDRFSGSGSGTDFTLKISRVEA |
| | EDVGVYYCSQSTRVPYTFGQGTKLEIK (SEQ ID NO: 1808) |
| AL2p-27 | GVVMTQTPLSLSVTPGQPASISCRSSRSLVHSNGYTYLHWYL |
| | QKPGQSPQLLIYKVSNRVSGVPDRFSGSGSGTDFTLKISRVEA |
| | EDVGVYYCSQSTRVPYTFGQGTKLEIK (SEQ ID NO: 1809) |
| AL2p-33 | GVVMAQTPLSLSVTPGQPASISCRTSQSLVHSNGYTYLHWY |
| | LQKPGQSPQLLIYKVSNRVSGVPDRFSGSGSGTDFTLKISRVE |
| | AEDVGVYYCSQSTRVPYTFGQGTKLEIK (SEQ ID NO: 1810) |
| AL2p-h77, AL2p-35, AL2p-36, | DVVMTQSPDSLAVSLGERATINCRSSQSLVHSNGYTYLHWY |
| AL2p-37, and AL2p-h76 | QQKPGQSPKLLIYKVSNRFSGVPDRFSGSGSGTDFTLTISSLQ |
| | AEDVAVYYCSQSTRVPYTFGGGTKVEIK (SEQ ID NO: 1811) |
| AL2p-38 and AL2p-43 | GVVMTQTPLSLSVTPGQPASISCRSSRSLVHSNRYTYLHWYL |
| | QKPGQSPQLLIYKVSNRRSGVPDRFSGSGSGTDFTLKISRVEA |
| | EDVGVYYCSQSTRVPYTFGQGTKLEIK (SEQ ID NO: 1812) |
| AL2p-39 and AL2p-41 | GVVMTQTPLSLSVTPGQPASISCRSSRSLVHSNQYTYLHWYL |
| | QKPGQSPQLLIYKVSNRRSGVPDRFSGSGSGTDFTLKISRVEA |
| | EDVGVYYCSQSTRVPYTFGQGTKLEIK (SEQ ID NO: 1813) |
| AL2p-40, AL2p-42, and AL2p-44 | GVVMTQTPLSLSVTPGQPASISCRTSRSLVHSNRYTYLHWYL |
| | QKPGQSPQLLIYKVSNRRSGVPDRFSGSGSGTDFTLKISRVEA |
| | EDVGVYYCSQSTRVPYTFGQGTKLEIK (SEQ ID NO: 1814) |
| AL2p-45 AL2p-47 AL2p-50 | DVVMTQTPLSLSVTPGQPASISCRTSQSLVHSNAYTYLHWY |
| AL2p-52, AL2p-55, and AL2p-56 | LQKPGQSPQLLIYKVSNRVSGVPDRFSGSGSGTDFTLKISRVE |
| | AEDVGVYYCSQSTRVPYTFGQGTKLEIK (SEQ ID NO: 1815) |
| AL2p-46, AL2p-48, AL2p-49, | DVVMTQTPLSLSVTPGQPASISCRTSQSLVHSNQYTYLHWY |
| AL2p-51, AL2p-53, AL2p-54, and | LQKPGQSPQLLIYKVSNRVSGVPDRFSGSGSGTDFTLKISRVE |
| AL2p-57 | AEDVGVYYCSQSTRVPYTFGQGTKLEIK (SEQ ID NO: 1816) |
| AL2p-61 | GVVMTQTPLSLSVTPGQPASISCRSSQSLVHSNQYTYLHWYL |
| | QKPGQSPQLLIYKVSNRRSGVPDRFSGSGSGTDFTLKISRVEA |
| | EDVGVYYCSQSTRVPYTFGQGTKLEIK (SEQ ID NO: 1817) |
| AL2p-62 | DVVMTQSPDSLAVSLGERATINCRSSQSLVHSNQYTYLHWY |
| | QQKPGQSPKLLIYKVSNRFSGVPDRFSGSGSGTDFTLTISSLQ |
| | AEDVAVYYCSQSTRVPYTFGGGTKVEIK (SEQ ID NO: 1818) |
| AL2p-58 | DVVMTQSPDSLAVSLGERATINCRSSQSLVHSNRYTYLHWY |
| | QQKPGQSPKLLIYKVSNRFSGVPDRFSGSGSGTDFTLKISRVE |
| | AEDVGVYYCSQSTRVPYTFGQGTKLEIK (SEQ ID NO: 1819) |
| AL2p-60 | GVVMTQTPLSLSVTPGQPASISCRSSQSLVHSNRYTYLHWYL |
| | QKPGQSPQLLIYKVSNRRSGVPDRFSGSGSGTDFTLKISRVEA |
| | EDVGVYYCSQSTRVPYTFGQGTKLEIK (SEQ ID NO: 1820) |
| AL2p-h19 | DIVMTQTPLSLSVTPGQPASISCRSSQSLVHSNGYTYLHWYL |
| | QKPGQSPQLLIYKVSNRFSGVPDRFSGSGSGTDFTLKISRVEA |
| | EDVGVYYCSQSTRVPYTFGQGTKLEIK (SEQ ID NO: 1821) |
| AL2p-h21, AL2p-h22, AL2p-h23, | DVVMTQTPLSLSVTPGQPASISCRSSQSLVHSNGYTYLHWYL |
| AL2p-h24, AL2p-h25, AL2p-h26, | QKPGQSPQLLIYKVSNRFSGVPDRFSGSGSGTDFTLKISRVEA |
| AL2p-h27, AL2p-h28, AL2p-h29 | EDLGVYFCSQSTRVPYTFGQGTKLEIK (SEQ ID NO: 1822) |
| AL2p-h30, AL2p-h31, AL2p-h32, | |
| AL2p-h33, AL2p- h34, AL2p-h35, | |
| AL2p-h36 | DIVMTQSPLSLPVTPGEPASISCRSSQSLVHSNGYTYLHWYL |
| AL2p-h59 | QKPGQSPQLLIYKVSNRFSGVPDRFSGSGSGTDFTLKISRVEA |
| | EDVGVYYCSQSTRVPYTFGGGTKVEIK (SEQ ID NO: 1823) |
| AL2p-h90 | DVQMTQSPSSLSASVGDRVTITCRSSQSLVHSNGYTYLHWY |
| | QQKPGKSPKLLIYKVSNRFSGVPSRFSGSGSGTDFTLTISSLQP |
| | EDFATYYCSQSTRVPYTFGGGTKVEIK (SEQ ID NO: 1824) |
| AL2p-59 | GVVMTQTPLSLSVTPGQPASISCRTSQSLVHSNQYTYLHWY |
| | LQKPGQSPQLLIYKVSNRVSGVPDRFSGSGSGTDFTLKISRVE |
| | AEDVGVYYCSQSTRVPYTFGQGTKLEIK (SEQ ID NO: 1825) |

TABLE E18
Light chain sequences of anti-TREM2 antibodies

| Ab | LC |
|---|---|
| AL2p-58 | DVVMTQSPDSLAVSLGERATINCRSSQSLVHSNRYTYLH |
| huIgGl, | WYQQKPGQSPKLLIYKVSNRFSGVPDRFSGSGSGTDFTL |
| and | KISRVEAEDVGVYYCSQSTRVPYTFGQGTKLEIKRTVAA |
| AL2p-58 | PSVFIFPPSDEQLKSGTASVVCLLNNFYPREAKVQWKVD |
| huIgG1 | NALQSGNSQESVTEQDSKDSTYSLSSTLTLSKADYEKHK |
| PSEG | VYACEVTHQGLSSPVTKSFNRGEC |
| | (SEQ ID NO: 1921) |
| AL2p-47 | DVVMTQTPLSLSVTPGQPASISCRTSQSLVHSNAYTYLH |
| huIgGl, | WYLQKPGQSPQLLIYKVSNRVSGVPDRFSGSGSGTDFTL |
| and | KISRVEAEDVGVYYCSQSTRVPYTFGQGTKLEIKRTVAA |
| AL2p-47 | PSVFIFPPSDEQLKSGTASVVCLLNNFYPREAKVQWKVD |
| huIgG1 | NALQSGNSQESVTEQDSKDSTYSLSSTLTLSKADYEKHK |
| PSEG | VYACEVTHQGLSSPVTKSFNRGEC |
| | (SEQ ID NO: 1922) |
| AL2p-61 | GVVMTQTPLSLSVTPGQPASISCRSSQSLVHSNQYTYLH |
| huIgG1 | WYLQKPGQSPQLLIYKVSNRRSGVPDRFSGSGSGTDFTL |
| | KISRVEAEDVGVYYCSQSTRVPYTFGQGTKLEIKRTVAA |
| | PSVFIFPPSDEQLKSGTASVVCLLNNFYPREAKVQWKVD |
| | NALQSGNSQESVTEQDSKDSTYSLSSTLTLSKADYEKHK |
| | VYACEVTHQGLSSPVTKSFNRGEC |
| | (SEQ ID NO: 1923) |
| AL2p-41 | GVVMTQTPLSLSVTPGQPASISCRSSRSLVHSNQYTYLH |
| huIgG1 | WYLQKPGQSPQLLIYKVSNRRSGVPDRFSGSGSGTDFTL |
| | KISRVEAEDVGVYYCSQSTRVPYTFGQGTKLEIKRTVAA |
| | PSVFIFPPSDEQLKSGTASVVCLLNNFYPREAKVQWKVD |
| | NALQSGNSQESVTEQDSKDSTYSLSSTLTLSKADYEKHK |
| | VYACEVTHQGLSSPVTKSFNRGEC |
| | (SEQ ID NO: 1924) |
| AL2p-40 | GVVMTQTPLSLSVTPGQPASISCRTSRSLVHSNRYTYLH |
| huIgG1, | WYLQKPGQSPQLLIYKVSNRRSGVPDRFSGSGSGTDFTL |
| and | KISRVEAEDVGVYYCSQSTRVPYTFGQGTKLEIKRTVAA |
| AL2p-44 | PSVFIFPPSDEQLKSGTASVVCLLNNFYPREAKVQWKVD |
| huIgG1 | NALQSGNSQESVTEQDSKDSTYSLSSTLTLSKADYEKHK |
| | VYACEVTHQGLSSPVTKSFNRGEC |
| | (SEQ ID NO: 1925) |

[0353] In some embodiments, each of the light chain variable regions and each of the heavy chain variable regions disclosed in TABLES E1-E18 as well as specific combinations thereof and other embodiments of the anti-TREM2 antibody described in the '573 application and herein may be attached to the light chain constant regions (TABLE EN1) and heavy chain constant regions (TABLE EN2) to form complete antibody light and heavy chains, respectively, as further discussed below. Further, each of the generated heavy and light chain sequences may be combined to form a complete antibody structure. It should be understood that the heavy chain and light chain variable regions provided herein can also be attached to other constant domains having different sequences than the exemplary sequences listed herein.

F. PCT Patent Application Publication No. WO2018/015573A1

[0354] In some embodiments, the TREM2 agonist is an antibody, or antigen binding fragment thereof, that prevents the cleavage of TREM2 as described in PCT Patent Application Publication No. WO2018/015573A1 (“the '573 application”), which is incorporated by reference herein, in its entirety.

[0355] In some embodiments, the TREM2 binding agent comprises an antibody that comprises a light chain variable domain comprising a CDRL1, CDRL2, and CDRL3, and a heavy chain variable domain comprising a CDRH1, CDRH2, and CDRH3 disclosed in the '573 application specification. In some embodiments, the TREM2 binding agent comprises an antibody that comprises a light chain variable domain and a heavy chain variable domain disclosed in the '573 application specification.

[0356] In some embodiments, the antibody is a binding molecule that inhibits (preferably prevents) TREM2 cleavage. More specifically, in the context of the present invention cleavage (i.e. shedding) of the TREM2 ectodomain is inhibited by the binding molecule of the present invention. In some embodiments, the antibody is a binding molecule that inhibits (preferably prevents) TREM2 cleavage and activates TREM2 activity. In some embodiments, the herein provided binding molecule has a binding site within the ectodomain of TREM2, preferably the stalk region of the TREM2 ectodomain.

[0357] In some embodiments, the antibody is:
[0358] (1) an antibody, wherein the heavy chain variable region comprises the sequence of SEQ ID NO: 1955 and the light chain variable region comprises the sequence of SEQ ID NO: 1965; and wherein the antibody inhibits TREM2 cleavage;
[0359] (2) an antibody, wherein the heavy chain variable region comprises a sequence having at least 85%, preferably at least 90%, more preferably at least 95%, even more preferably at least 98%, and most preferably at least 99% identity to SEQ ID NO: 1955, and the light chain variable region comprises a sequence having at least 85%, preferably at least 90%, more preferably at least 95%, even more preferably at least 98%, and most preferably at least 99% identity to SEQ ID NO: 1965; and wherein the antibody inhibits TREM2 cleavage;
[0360] (3) an antibody, wherein the CDR1 of the heavy chain variable region comprises the amino acid sequence of SEQ ID NO: 1975; the CDR2 of the heavy chain variable region comprises the amino acid sequence of SEQ ID NO: 1985; the CDR3 of the heavy chain variable region comprises the amino acid sequence of SEQ ID NO: 1995; the CDR1 of the light chain variable region comprises the amino acid sequence of SEQ ID NO: 2005; the CDR2 of the light chain variable region comprises the amino acid sequence of SEQ ID NO:2015; and the CDR3 of the light chain variable region comprises the amino acid sequence of SEQ ID NO:2025; and wherein the antibody inhibits TREM2 cleavage; or
[0361] (4) an antibody, wherein the CDR1 of the heavy chain variable region comprises an amino acid sequence having at least 70%, preferably at least 75%, more preferably at least 80%, and most preferably at least 85% identity to SEQ ID NO: 1975; the CDR2 of the heavy chain variable region comprises an amino acid sequence having at least 70%, preferably at least 75%, more preferably at least 80%, even more preferably at least 85%, and most preferably at least 90% identity to SEQ ID NO:1985; the CDR3 of the heavy chain variable region comprises an amino acid sequence having at least 70%, preferably at least 75%, more preferably at least 80%, even more preferably at least 85%, and most preferably at least 90% identity to SEQ ID NO: 1995; the CDR1 of the light chain variable region comprises an amino acid sequence having at least 70%, preferably at least 75%, more preferably at least 80%, even more preferably at least 85%, and most preferably at least 90% identity to SEQ ID NO:2005; the CDR2 of the light chain variable region comprises an amino acid sequence having at least 60%, preferably 100% identity to SEQ ID NO:2015; and the CDR3 of the light chain variable region comprises an amino acid sequence having at least 70%, preferably at least 75%, more preferably at least 80%, and most preferably at least 85% identity to SEQ ID NO:2025; and wherein the antibody inhibits TREM2 cleavage.

[0362] In some embodiments, the antibody is antibody clone 14D3, which is:
[0363] (1) an antibody, wherein the heavy chain variable region comprises the sequence of SEQ ID NO: 1946 and the light chain variable region comprises the sequence of SEQ ID NO: 1956; and wherein the antibody inhibits TREM2 cleavage;
[0364] (2) an antibody, wherein the heavy chain variable region comprises a sequence having at least 85% identity to SEQ ID NO: 1946, and the light chain variable region comprises a sequence having at least 85% identity to SEQ ID NO: 1956; and wherein the antibody inhibits TREM2 cleavage;
[0365] (3) an antibody, wherein the CDR1 of the heavy chain variable region comprises the amino acid sequence of SEQ ID NO: 1966; the CDR2 of the heavy chain variable region comprises the amino acid sequence of SEQ ID NO: 1976; the CDR3 of the heavy chain variable region comprises the amino acid sequence of SEQ ID NO: 1986; the CDR1 of the light chain variable region comprises the amino acid sequence of SEQ ID NO: 1996; the CDR2 of the light chain variable region comprises the amino acid sequence of SEQ ID NO:2006; and the CDR3 of the light chain variable region comprises the amino acid sequence of SEQ ID NO:2016; and wherein the antibody inhibits TREM2 cleavage; or
[0366] (4) an antibody, wherein the CDR1 of the heavy chain variable region comprises an amino acid sequence having at least 70% identity to SEQ ID NO: 1966; the CDR2 of the heavy chain variable region comprises an amino acid sequence having at least 70% identity to SEQ ID NO: 1976; the CDR3 of the heavy chain variable region comprises an amino acid sequence having at least 70% identity to SEQ ID NO: 1986; the CDR1 of the light chain variable region comprises an amino acid sequence having at least 70% identity to SEQ ID NO: 1996; the CDR2 of the light chain variable region comprises an amino acid sequence having at least 60% identity to SEQ ID NO:2006; and the CDR3 of the light chain variable region comprises an amino acid sequence having at least 70% identity to SEQ ID NO:2016; and wherein the antibody inhibits TREM2 cleavage.

[0367] In some embodiments, the antibody is antibody clone 14D8, which is:
[0368] (1) an antibody, wherein the heavy chain variable region comprises the sequence of SEQ ID NO:1947 and the light chain variable region comprises the sequence of SEQ ID NO: 1957; and wherein the antibody inhibits TREM2 cleavage;
[0369] (2) an antibody, wherein the heavy chain variable region comprises a sequence having at least 85% identity to SEQ ID NO:1947, and the light chain variable region comprises a sequence having at least 85% identity to SEQ ID NO: 1957; and wherein the antibody inhibits TREM2 cleavage;
[0370] (3) an antibody, wherein the CDR1 of the heavy chain variable region comprises the amino acid sequence of SEQ ID NO:1967; the CDR2 of the heavy chain variable region comprises the amino acid sequence of SEQ ID NO: 1977; the CDR3 of the heavy chain variable region comprises the amino acid sequence of SEQ ID NO: 1987; the CDR1 of the light chain variable region comprises the amino acid sequence of SEQ ID NO: 1997; the CDR2 of the light chain variable region comprises the amino acid sequence of SEQ ID NO:2007; and the CDR3 of the light chain variable region comprises the amino acid sequence of SEQ ID NO:2017; and wherein the antibody inhibits TREM2 cleavage; or
[0371] (4) an antibody, wherein the CDR1 of the heavy chain variable region comprises an amino acid sequence having at least 70% identity to SEQ ID NO: 1967; the CDR2 of the heavy chain variable region comprises an amino acid sequence having at least 70% identity to SEQ ID NO: 1977; the CDR3 of the heavy chain variable region comprises an amino acid sequence having at least 70% identity to SEQ ID NO: 1987; the CDR1 of the light chain variable region comprises an amino acid sequence having at least 70% identity to SEQ ID NO: 1997; the CDR2 of the light chain variable region comprises an amino acid sequence having at least 60% identity to SEQ ID NO:2007; and the CDR3 of the light chain variable region comprises an amino acid sequence having at least 70% identity to SEQ ID NO:2017; and wherein the antibody inhibits TREM2 cleavage.

[0372] In some embodiments, the antibody is antibody clone 7A12, which is:
[0373] (1) an antibody, wherein the heavy chain variable region comprises the sequence of SEQ ID NO: 1948 and the light chain variable region comprises the sequence of SEQ ID NO: 1958; and wherein the antibody inhibits TREM2 cleavage;
[0374] (2) an antibody, wherein the heavy chain variable region comprises a sequence having at least 85%, preferably at least 90%, more preferably at least 95%, even more preferably at least 98%, and most preferably at least 99% identity to SEQ ID NO: 1948, and the light chain variable region comprises a sequence having at least 85%, preferably at least 90%, more preferably at least 95%, even more preferably at least 98%, and most preferably at least 99% identity to SEQ ID NO: 1958; and wherein the antibody inhibits TREM2 cleavage;
[0375] (3) an antibody, wherein the CDR1 of the heavy chain variable region comprises the amino acid sequence of SEQ ID NO: 1968; the CDR2 of the heavy chain variable region comprises the amino acid sequence of SEQ ID NO: 1978; the CDR3 of the heavy chain variable region comprises the amino acid sequence of SEQ ID NO: 1988; the CDR1 of the light chain variable region comprises the amino acid sequence of SEQ ID NO: 1998; the CDR2 of the light chain variable region comprises the amino acid sequence of SEQ ID NO:2008; and the CDR3 of the light chain variable region comprises the amino acid sequence of SEQ ID NO:2018; and wherein the antibody inhibits TREM2 cleavage; or
[0376] (4) an antibody, wherein the CDR1 of the heavy chain variable region comprises an amino acid sequence having at least 70%, preferably at least 75%, more preferably at least 80%, and most preferably at least 85% identity to SEQ ID NO: 1968; the CDR2 of the heavy chain variable region comprises an amino acid sequence having at least 70%, preferably at least 75%, more preferably at least 80%, even more preferably at least 85%, and most preferably at least 90% identity to SEQ ID NO:1978; the CDR3 of the heavy chain variable region comprises an amino acid sequence having at least 70%, preferably at least 75%, more preferably at least 80%, even more preferably at least 85%, and most preferably at least 90% identity to SEQ ID NO: 1988; the CDR1 of the light chain variable region comprises an amino acid sequence having at least 70%, preferably at least 75%, more preferably at least 80%, even more preferably at least 85%, and most preferably at least 90% identity to SEQ ID NO: 1998; the CDR2 of the light chain variable region comprises an amino acid sequence having at least 60%, preferably 100% identity to SEQ ID NO:2008; and the CDR3 of the light chain variable region comprises an amino acid sequence having at least 70%, preferably at least 75%, more preferably at least 80%, and most preferably at least 85% identity to SEQ ID NO:2018; and wherein the antibody inhibits TREM2 cleavage.

[0377] In some embodiments, the antibody is antibody clone 8A11, which is:
[0378] (1) an antibody, wherein the heavy chain variable region comprises the sequence of SEQ ID NO: 1949 and the light chain variable region comprises the sequence of SEQ ID NO: 1959; and wherein the antibody inhibits TREM2 cleavage;
[0379] (2) an antibody, wherein the heavy chain variable region comprises a sequence having at least 85%, preferably at least 90%, more preferably at least 95%, even more preferably at least 98%, and most preferably at least 99% identity to SEQ ID NO: 1949, and the light chain variable region comprises a sequence having at least 85%, preferably at least 90%, more preferably at least 95%, even more preferably at least 98%, and most preferably at least 99% identity to SEQ ID NO: 1959; and wherein the antibody inhibits TREM2 cleavage;
[0380] (3) an antibody, wherein the CDR1 of the heavy chain variable region comprises the amino acid sequence of SEQ ID NO: 1969; the CDR2 of the heavy chain variable region comprises the amino acid sequence of SEQ ID NO: 1979; the CDR3 of the heavy chain variable region comprises the amino acid sequence of SEQ ID NO: 1989; the CDR1 of the light chain variable region comprises the amino acid sequence of SEQ ID NO: 1999; the CDR2 of the light chain variable region comprises the amino acid sequence of SEQ ID NO:2009; and the CDR3 of the light chain variable region comprises the amino acid sequence of SEQ ID NO:2019; and wherein the antibody inhibits TREM2 cleavage; or
[0381] (4) an antibody, wherein the CDR1 of the heavy chain variable region comprises an amino acid sequence having at least 70%, preferably at least 75%, more preferably at least 80%, and most preferably at least 85% identity to SEQ ID NO: 1969; the CDR2 of the heavy chain variable region comprises an amino acid sequence having at least 70%, preferably at least 75%, more preferably at least 80%, even more preferably at least 85%, and most preferably at least 90% identity to SEQ ID NO:1979; the CDR3 of the heavy chain variable region comprises an amino acid sequence having at least 70%, preferably at least 75%, more preferably at least 80%, even more preferably at least 85%, and most preferably at least 90% identity to SEQ ID NO: 1989; the CDR1 of the light chain variable region comprises an amino acid sequence having at least 70%, preferably at least 75%, more preferably at least 80%, even more preferably at least 85%, and most preferably at least 90% identity to SEQ ID NO: 1999; the CDR2 of the light chain variable region comprises an amino acid sequence having at least 60%, preferably 100% identity to SEQ ID NO:2009; and the CDR3 of the light chain variable region comprises an amino acid sequence having at least 70%, preferably at least 75%, more preferably at least 80%, and most preferably at least 85% identity to SEQ ID NO:2019; and wherein the antibody inhibits TREM2 cleavage.

[0382] In some embodiments, the antibody is antibody clone 21A3, which is:
[0383] (1) an antibody, wherein the heavy chain variable region comprises the sequence of SEQ ID NO: 1950 and the light chain variable region comprises the sequence of SEQ ID NO: 1960; and wherein the antibody inhibits TREM2 cleavage;
[0384] (2) an antibody, wherein the heavy chain variable region comprises a sequence having at least 85%, preferably at least 90%, more preferably at least 95%, even more preferably at least 98%, and most preferably at least 99% identity to SEQ ID NO: 1950, and the light chain variable region comprises a sequence having at least 85%, preferably at least 90%, more preferably at least 95%, even more preferably at least 98%, and most preferably at least 99% identity to SEQ ID NO: 1960; and wherein the antibody inhibits TREM2 cleavage;
[0385] (3) an antibody, wherein the CDR1 of the heavy chain variable region comprises the amino acid sequence of SEQ ID NO: 1970; the CDR2 of the heavy chain variable region comprises the amino acid sequence of SEQ ID NO: 1980; the CDR3 of the heavy chain variable region comprises the amino acid sequence of SEQ ID NO: 1990; the CDR1 of the light chain variable region comprises the amino acid sequence of SEQ ID NO: 2000; the CDR2 of the light chain variable region comprises the amino acid sequence of SEQ ID NO:2010; and the CDR3 of the light chain variable region comprises the amino acid sequence of SEQ ID NO:2020; and wherein the antibody inhibits TREM2 cleavage; or
[0386] (4) an antibody, wherein the CDR1 of the heavy chain variable region comprises an amino acid sequence having at least 70%, preferably at least 75%, more preferably at least 80%, and most preferably at least 85% identity to SEQ ID NO: 1970; the CDR2 of the heavy chain variable region comprises an amino acid sequence having at least 70%, preferably at least 75%, more preferably at least 80%, even more preferably at least 85%, and most preferably at least 90% identity to SEQ ID NO:1980; the CDR3 of the heavy chain variable region comprises an amino acid sequence having at least 70%, preferably at least 75%, more preferably at least 80%, even more preferably at least 85%, and most preferably at least 90% identity to SEQ ID NO: 1990; the CDR1 of the light chain variable region comprises an amino acid sequence having at least 70%, preferably at least 75%, more preferably at least 80%, even more preferably at least 85%, and most preferably at least 90% identity to SEQ ID NO:2000; the CDR2 of the light chain variable region comprises an amino acid sequence having at least 60%, preferably 100% identity to SEQ ID NO:2010; and the CDR3 of the light chain variable region comprises an amino acid sequence having at least 70%, preferably at least 75%, more preferably at least 80%, and most preferably at least 85% identity to SEQ ID NO:2020; and wherein the antibody inhibits TREM2 cleavage.

[0387] In some embodiments, the antibody is antibody clone 10C3, which is:
[0388] (1) an antibody, wherein the heavy chain variable region comprises the sequence of SEQ ID NO: 1951 and the light chain variable region comprises the sequence of SEQ ID NO:1961; and wherein the antibody inhibits TREM2 cleavage;
[0389] (2) an antibody, wherein the heavy chain variable region comprises a sequence having at least 85%, preferably at least 90%, more preferably at least 95%, even more preferably at least 98%, and most preferably at least 99% identity to SEQ ID NO:1951, and the light chain variable region comprises a sequence having at least 85%, preferably at least 90%, more preferably at least 95%, even more preferably at least 98%, and most preferably at least 99% identity to SEQ ID NO:1961; and wherein the antibody inhibits TREM2 cleavage;
[0390] (3) an antibody, wherein the CDR1 of the heavy chain variable region comprises the amino acid sequence of SEQ ID NO: 1971; the CDR2 of the heavy chain variable region comprises the amino acid sequence of SEQ ID NO:1981; the CDR3 of the heavy chain variable region comprises the amino acid sequence of SEQ ID NO:1991; the CDR1 of the light chain variable region comprises the amino acid sequence of SEQ ID NO:2001; the CDR2 of the light chain variable region comprises the amino acid sequence of SEQ ID NO:2011; and the CDR3 of the light chain variable region comprises the amino acid sequence of SEQ ID NO:2021; and wherein the antibody inhibits TREM2 cleavage; or
[0391] (4) an antibody, wherein the CDR1 of the heavy chain variable region comprises an amino acid sequence having at least 70%, preferably at least 75%, more preferably at least 80%, and most preferably at least 85% identity to SEQ ID NO: 1971; the CDR2 of the heavy chain variable region comprises an amino acid sequence having at least 70%, preferably at least 75%, more preferably at least 80%, even more preferably at least 85%, and most preferably at least 90% identity to SEQ ID NO:1981; the CDR3 of the heavy chain variable region comprises an amino acid sequence having at least 70%, preferably at least 75%, more preferably at least 80%, even more preferably at least 85%, and most preferably at least 90% identity to SEQ ID NO:1991; the CDR1 of the light chain variable region comprises an amino acid sequence having at least 70%, preferably at least 75%, more preferably at least 80%, even more preferably at least 85%, and most preferably at least 90% identity to SEQ ID NO:2001; the CDR2 of the light chain variable region comprises an amino acid sequence having at least 60%, preferably 100% identity to SEQ ID NO:2011; and the CDR3 of the light chain variable region comprises an amino acid sequence having at least 70%, preferably at least 75%, more preferably at least 80%, and most preferably at least 85% identity to SEQ ID NO:2021; and wherein the antibody inhibits TREM2 cleavage.

[0392] In some embodiments, the antibody is antibody clone 18F9, which is:
[0393] (1) an antibody, wherein the heavy chain variable region comprises the sequence of SEQ ID NO: 1952 and the light chain variable region comprises the sequence of SEQ ID NO: 1962; and wherein the antibody inhibits TREM2 cleavage;
[0394] (2) an antibody, wherein the heavy chain variable region comprises a sequence having at least 85%, preferably at least 90%, more preferably at least 95%, even more preferably at least 98%, and most preferred at least 99% identity to SEQ ID NO: 1952, and the light chain variable region comprises a sequence having at least 85%, preferably at least 90%, more preferably at least 95%, even more preferably at least 98%, and most preferably at least 99% identity to SEQ ID NO: 1962; and wherein the antibody inhibits TREM2 cleavage;
[0395] (3) an antibody, wherein the CDR1 of the heavy chain variable region comprises the amino acid sequence of SEQ ID NO: 1972; the CDR2 of the heavy chain variable region comprises the amino acid sequence of SEQ ID NO: 1982; the CDR3 of the heavy chain variable region comprises the amino acid sequence of SEQ ID NO: 1992; the CDR1 of the light chain variable region comprises the amino acid sequence of SEQ ID NO: 2002; the CDR2 of the light chain variable region comprises the amino acid sequence of SEQ ID NO:2012; and the CDR3 of the light chain variable region comprises the amino acid sequence of SEQ ID NO:2022; and wherein the antibody inhibits TREM2 cleavage; or
[0396] (4) an antibody, wherein the CDR1 of the heavy chain variable region comprises an amino acid sequence having at least 70%, preferably at least 75%, more preferably at least 80%, and most preferably at least 85% identity to SEQ ID NO: 1972; the CDR2 of the heavy chain variable region comprises an amino acid sequence having at least 70%, preferably at least 75%, more preferably at least 80%, even more preferably at least 85%, and most preferably at least 90% identity to SEQ ID NO:1982; the CDR3 of the heavy chain variable region comprises an amino acid sequence having at least 70%, preferably at least 75%, more preferably at least 80%, even more preferably at least 85%, and most preferably at least 90% identity to SEQ ID NO: 1992; the CDR1 of the light chain variable region comprises an amino acid sequence having at least 70%, preferably at least 75%, more preferably at least 80%, even more preferably at least 85%, and most preferably at least 90% identity to SEQ ID NO:2002; the CDR2 of the light chain variable region comprises an amino acid sequence having at least 60%, preferably 100% identity to SEQ ID NO:2012; and the CDR3 of the light chain variable region comprises an amino acid sequence having at least 70%, preferably at least 75%, more preferably at least 80%, and most preferably at least 85% identity to SEQ ID NO:2022; and wherein the antibody inhibits TREM2 cleavage.

[0397] In some embodiments, the antibody is antibody clone 15C5, which is:
[0398] (1) an antibody, wherein the heavy chain variable region comprises the sequence of SEQ ID NO: 1953 and the light chain variable region comprises the sequence of SEQ ID NO: 1963; and wherein the antibody inhibits TREM2 cleavage;
[0399] (2) an antibody, wherein the heavy chain variable region comprises a sequence having at least 85%, preferably at least 90%, more preferably at least 95%, even more preferably at least 98%, and most preferably at least 99% identity to SEQ ID NO: 1953, and the light chain variable region comprises a sequence having at least 85%, preferably at least 90%, more preferably at least 95%, even more preferably at least 98%, and most preferably at least 99% identity to SEQ ID NO: 1963; and wherein the antibody inhibits TREM2 cleavage;
[0400] (3) an antibody, wherein the CDR1 of the heavy chain variable region comprises the amino acid sequence of SEQ ID NO: 1973; the CDR2 of the heavy chain variable region comprises the amino acid sequence of SEQ ID NO: 1983; the CDR3 of the heavy chain variable region comprises the amino acid sequence of SEQ ID NO: 1993; the CDR1 of the light chain variable region comprises the amino acid sequence of SEQ ID NO: 2003; the CDR2 of the light chain variable region comprises the amino acid sequence of SEQ ID NO:2013; and the CDR3 of the light chain variable region comprises the amino acid sequence of SEQ ID NO:2023; and wherein the antibody inhibits TREM2 cleavage; or
[0401] (4) an antibody, wherein the CDR1 of the heavy chain variable region comprises an amino acid sequence having at least 70%, preferably at least 75%, more preferably at least 80%, and most preferably at least 85% identity to SEQ ID NO: 1973; the CDR2 of the heavy chain variable region comprises an amino acid sequence having at least 70%, preferably at least 75%, more preferably at least 80%, even more preferably at least 85%, and most preferably at least 90% identity to SEQ ID NO:1983; the CDR3 of the heavy chain variable region comprises an amino acid sequence having at least 70%, preferably at least 75%, more preferably at least 80%, even more preferably at least 85%, and most preferably at least 90% identity to SEQ ID NO: 1993; the CDR1 of the light chain variable region comprises an amino acid sequence having at least 70%, preferably at least 75%, more preferably at least 80%, even more preferably at least 85%, and most preferably at least 90% identity to SEQ ID NO:2003; the CDR2 of the light chain variable region comprises an amino acid sequence having at least 60%, preferably 100% identity to SEQ ID NO:2013; and the CDR3 of the light chain variable region comprises an amino acid sequence having at least 70%, preferably at least 75%, more preferably at least 80%, and most preferably at least 85% identity to SEQ ID NO:2023; and wherein the antibody inhibits TREM2 cleavage.

[0402] In some embodiments, the antibody is antibody clone 1G6, which is:
[0403] (1) an antibody, wherein the heavy chain variable region comprises the sequence of SEQ ID NO: 1954 and the light chain variable region comprises the sequence of SEQ ID NO: 1964; and wherein the antibody inhibits TREM2 cleavage;
[0404] (2) an antibody, wherein the heavy chain variable region comprises a sequence having at least 85%, preferably at least 90%, more preferably at least 95%, even more preferably at least 98%, and most preferably at least 99% identity to SEQ ID NO: 1954, and the light chain variable region comprises a sequence having at least 85%, preferably at least 90%, more preferably at least 95%, even more preferably at least 98%, and most preferably at least 99% identity to SEQ ID NO: 1964; and wherein the antibody inhibits TREM2 cleavage;
[0405] (3) an antibody, wherein the CDR1 of the heavy chain variable region comprises the amino acid sequence of SEQ ID NO: 1974; the CDR2 of the heavy chain variable region comprises the amino acid sequence of SEQ ID NO: 1984; the CDR3 of the heavy chain variable region comprises the amino acid sequence of SEQ ID NO: 1994; the CDR1 of the light chain variable region comprises the amino acid sequence of SEQ ID NO: 2004; the CDR2 of the light chain variable region comprises the amino acid sequence of SEQ ID NO:2014; and the CDR3 of the light chain variable region comprises the amino acid sequence of SEQ ID NO:2024; and wherein the antibody inhibits TREM2 cleavage; or
[0406] (4) an antibody, wherein the CDR1 of the heavy chain variable region comprises an amino acid sequence having at least 70%, preferably at least 75%, more preferably at least 80%, and most preferably at least 85% identity to SEQ ID NO: 1974; the CDR2 of the heavy chain variable region comprises an amino acid sequence having at least 70%, preferably at least 75%, more preferably at least 80%, even more preferably at least 85%, and most preferably at least 90% identity to SEQ ID NO:1984; the CDR3 of the heavy chain variable region comprises an amino acid sequence having at least 70%, preferably at least 75%, more preferably at least 80%, even more preferably at least 85%, and most preferably at least 90% identity to SEQ ID NO: 1994; the CDR1 of the light chain variable region comprises an amino acid sequence having at least 70%, preferably at least 75%, more preferably at least 80%, even more preferably at least 85%, and most preferably at least 90% identity to SEQ ID NO:2004; the CDR2 of the light chain variable region comprises an amino acid sequence having at least 60%, preferably 100% identity to SEQ ID NO:2014; and the CDR3 of the light chain variable region comprises an amino acid sequence having at least 70%, preferably at least 75%, more preferably at least 80%, and most preferably at least 85% identity to SEQ ID NO:2024; and wherein the antibody inhibits TREM2 cleavage.

[0407] In some embodiments, the antibody is an antibody disclosed in FIG. 9 of PCT Patent Application Publication No. WO2018/015573A1, reproduced below as TABLES F1-F4.

TABLE F1

| Clone | |
|---|---|
| name | Variable region of the heavy chain |
| 14D3 | EVKLLEFGGGLVQPGGSMRLSCAASGFTFTDFYMNW |
| | IRQPAGRAPEWLGLIRNKTKGYTTEYNRSVKGRFTI |
| | SRDNTQNMLYLQMNSLRPEDTATYYCARIGVNNGGS |
| | LDYWGQGVMVTVSS (SEQ ID NO: 1946) |
| 14D8 | EVKLLESGGGLVQPGGSMRLSCAASGFTFTDFYMNW |
| | IRQPAGKAPEWLGLIRNKANGYTTVYNPSVKGRFTI |
| | SRDNTQNMLYLQMNTLRGEDTATYYCARIGINNGGS |
| | LDYWGQGVMVTVSS (SEQ ID NO: 1947) |
| 7A12 | EVKLLESGGGLVQPGGSMRLSCAASGFTFTDFYMNW |
| | IRQPAGKAPEWLGLIRNKANGYTTQYNPSVKGRFTI |
| | SRDNTQNMLYLQMNTLRGEDTATYYCARIGINNGGS |
| | LDYWGQGVMVTVSS (SEQ ID NO: 1948) |
| 8A11 | EVKLLESGGGLVQPGGSMRLSCAASGFTFTDFYMNW |
| | IRQPAGKAPEWLGLIRNKTKGYTTEYNTSVKGRFTI |
| | SRDNTQNMLYLQMNSLRPEDTATYYCARIGVNNGGS |
| | LDYWGQGVMVTVSS (SEQ ID NO: 1949) |
| 21A3 | EVKLLESGGGLVQPGGSMRLSCAASGFTFTDFYMNW |
| | IRQPAGKAPEWLGLIRNKANGYTTQYNPSVKGRFTI |
| | SRDNTQNMLYLQMNTLRGEDTATYYCARIGINNGGS |
| | LDYWGQGVMVTVSS (SEQ ID NO: 1950) |
| 10C3 | EVKLLESGGGLVQPGGSMRLSCAASGFTFTDFYMNW |
| | IRQPAGETPEWLGLIRNKTKGYTTEYNPSVKGRFTI |
| | SRDNTQNMLYLQMNSLRPEDTATYYCARIGTNNGGS |
| | LDYWGQGVMVTVSS (SEQ ID NO: 1951) |
| 18F9 | EVKLLESGGGLVQPGGSMRLSCVVSGFTFTDFYMNW |
| | IRQAAGKAPEWLGLIRNKVNGYRTEYNPSVKGRFTI |
| | SRDNIQNMLYLQMNTLRAEDTATYYCARIGINNGGS |
| | LDYWGQGVMVTVSS (SEQ ID NO: 1952) |
| 15C5 | EVKLLESGGGLVQPGGSMRLSCAASGFTFTDFYMNW |
| | IRQPAGKAPEWLGLIRNKAYGYTTEYNPSVKGRFTI |
| | SRDNTQDMLYLQMNTLRAEDTATYYCARIGINYGGS |
| | LDYWGQGVMVTVSS (SEQ ID NO: 1953) |
| 1G6 | EVKLLESGGGLVQPGGSLRLSCVASGFTFTDFYMNW |
| | IRQPAGKAPEWLGLIRNKANGFTTEYNPSVKGRFTI |
| | SRDNTQHMLYLQMNTLRAEDTATYYCARIGINNGGS |
| | LDYWGQGVMVTVSS (SEQ ID NO: 1954) |
| Consensus | EVKLLESGGGLVQPGGSMRLSCAASGFTFTDFYMNW |
| sequence | IRQPAGKAPEWLGLIRNKANGYTTEYNPSVKGRFTI |
| | SRDNTQNMLYLQMNTLREDTATYYCARIGINNGGSL |
| | DYWGQGVMVTVSS (SEQ ID NO: 1955) |

TABLE F2

| Clone | |
|---|---|
| name | Variable region of the light chain |
| 14D3 | DILIIQSPASLTVSAGARVTMSCKSSQSLLYSENNQ |
| | DYLAWYQQKPGQFPKLLIYGASNRHTGVPDRFTGSG |
| | SGTDFTLTISSVQAEDLADYYCEQTYSYPYTFGAGT |
| | KLELK (SEQ ID NO: 1956) |
| 14D8 | DILINQSPASLTVSTGEKVTMSCRSSQSLLYSEKNQ |
| | DYLAWYQQKPGQFPKLLIYGASYRHTGVPDRFTGSG |
| | SGTDFTLTISSVQAEDLADYYCEQTYSYPYTFGAGT |
| | KLELK (SEQ ID NO: 1957) |
| 7A12 | DILINQSPASLTVSAGEKVTMSCKSSQSLLYSEKNQ |
| | DYLAWYQQKPGQSPKLLMYGASYRHTGVPDRFTGSG |
| | SGTDFTLTISSVQAEDLADYYCEQTYSYPYTFGAGT |
| | KLELK (SEQ ID NO: 1958) |
| 8A11 | DILIIQSPASLTVSAGARVTMSCKSSQSLLYSENNQ |
| | DYLAWYQQKPGQFPKLLIYGASNRHTGVPDRFTGSG |
| | SGTDFTLTISSVQAEDLADYYCEQTYSYPYTFGAGT |
| | KLELK (SEQ ID NO: 1959) |
| 21A3 | DILINQSPASLTVSAGEKVTMSCKSSQSLLYSEKNQ |
| | DYLAWYQQKPGQSPKLLMYGASYRHTGVPDRFTGSG |
| | SGTDFTLTISSVQAEDLADYYCEQTYSYPYTFGAGT |
| | KLELK (SEQ ID NO: 1960) |
| 10C3 | DILIIQSPASLTVSAGARVTMSCKSSQSLLYSENNQ |
| | DYLAWYQQKPGQFPKLLIYGASNRHTGVPDRFTGSG |
| | SGTDFTLTISSVQAEDLADYYCEQTYSYPYTFGAGT |
| | KLELK (SEQ ID NO: 1961) |
| 18F9 | DILINQSPASLTVSAGEKVTMSCKSSQSLLYSENNQ |
| | DYLAWYQQKPGQFPKLLIYGASNRHTGVPDRFTGSG |
| | SGTDFTLTISSVQAEDLADYYCEQTYSYPYTFGAG |
| | TKLELK (SEQ ID NO: 1962) |
| 15C5 | DILINQSPASLTVSAGEKVTVSCKSSQSLLYSESNQ |
| | DYLAWYQQKPGQFPKLLIYGASYRHTGVPDRFTGSG |
| | SGTDFTLTISSVQAEDLAHYYCEQTYSYPYTFGAGT |
| | KLELK (SEQ ID NO: 1963) |
| 1G6 | DILINQSPASLTVSTGEKVTMSCKSSQSLLYSENKQ |
| | DYLAWYQQKPGQFPKLLIYGASNRHTGVPDRFTGSG |
| | SGTDFTLTINIVQAEDLADYYCEQTYSYPYTFGAGT |
| | KLELK (SEQ ID NO: 1964) |
| Consensus | DILINQSPASLTVSAGEKVTMSCKSSQSLLYSENNQ |
| sequence | DYLAWYQQKPGQFPKLLIYGASNRHTGVPDRFTGSG |
| | SGTDFTLTISSVQAEDLADYYCEQTYSYPYTFGAGT |
| | KLELK (SEQ ID NO: 1965) |

TABLE F3

| | Complementarity determining regions in | | |
|---|---|---|---|
| Clone | the variable region of the heavy chain | | |
| name | CDR1 | CDR2 | CDR3 |
| 14D3 | GFTFTDFY | IRNKTKGYTT | ARIGVNNGGSLDYWG |
| | (SEQ ID | (SEQ ID | (SEQ ID NO: 1986) |
| | NO: 1966) | NO: 1976) | |
| 14D8 | GFTFTDFY | IRNKANGYTT | ARIGINNGGSLDYWG |
| | (SEQ ID | (SEQ ID | (SEQ ID NO: 1987) |
| | NO: 1967) | NO: 1977) | |
| 7Al2 | GFTFTDFY | IRNKANGYTT | ARIGINNGGSLDYWG |
| | (SEQ ID | (SEQ ID | (SEQ ID NO: 1988) |
| | NO: 1968) | NO: 1978) | |
| 8A11 | GFTFTDFY | IRNKTKGYTT | ARIGVNNGGSLDYWG |
| | (SEQ ID | (SEQ ID | (SEQ ID NO: 1989) |
| | NO: 1969) | NO: 1979) | |
| 21A3 | GFTFTDFY | IRNKANGYTT | ARIGINNGGSLDYWG |
| | (SEQ ID | (SEQ ID | (SEQ ID NO: 1990) |
| | NO: 1970) | NO: 1980) | |
| 10C3 | GFTFTDFY | IRNKTKGYTT | ARIGTNNGGSLDYWG |
| | (SEQ ID | (SEQ ID | (SEQ ID NO: 1991) |
| | NO: 1971) | NO: 1981) | |
| 18F9 | GFTFTDFY | IRNKVNGYRT | ARIGINNGGSLDYWG |
| | (SEQ ID | (SEQ ID | (SEQ ID NO: 1992) |
| | NO: 1972) | NO: 1982) | |
| 15C5 | GFTFTDFY | IRNKAYGYTT | ARIGINYGGSLDYWG |
| | (SEQ ID | (SEQ ID | (SEQ ID NO: 1993) |
| | NO: 1973) | NO: 1983) | |
| 1G6 | GFTFTDFY | IRNKANGFTT | ARIGINNGGSLDYWG |
| | (SEQ ID | (SEQ ID | (SEQ ID NO: 1994) |
| | NO: 1974) | NO: 1984) | |
| Consensus | GFTFTDFY | IRNKANGYTT | ARIGINNGGSLDYWG |
| | (SEQ ID | (SEQ ID | (SEQ ID NO: 1995) |
| | NO: 1975) | NO: 1985) | |

TABLE F4

| | Complementarity determining regions in | | |
|---|---|---|---|
| Clone | the variable region of the light chain | | |
| name | CDR1 | CDR2 | CDR3 |
| 14D3 | QSLLYSENNQDY | GAS | EQTYSYPYT |
| | (SEQ ID NO: 1996) | (SEQ ID | (SEQ ID |
| | | NO: 2006) | NO: 2016) |
| 14D8 | QSLLYSEKNQDY | GAS | EQTYSYPYT |
| | (SEQ ID NO: 1997) | (SEQ ID | (SEQ ID |
| | | NO: 2007) | NO: 2017) |
| 7Al2 | QSLLYSEKNQDY | GAS | EQTYSYPYT |
| | (SEQ ID NO: 1998) | (SEQ ID | (SEQ ID |
| | | NO: 2008) | NO: 2018) |
| 8A11 | QSLLYSENNQDY | GAS | EQTYSYPYT |
| | (SEQ ID NO: 1999) | (SEQ ID | (SEQ ID |
| | | NO: 2009) | NO: 2019) |
| 21A3 | QSLLYSEKNQDY | GAS | EQTYSYPYT |
| | (SEQ ID NO: 2000) | (SEQ ID | (SEQ ID |
| | | NO: 2010) | NO: 2020) |
| 10C3 | QSLLYSENNQDY | GAS | EQTYSYPYT |
| | (SEQ ID NO: 2001) | (SEQ ID | (SEQ ID |
| | | NO: 2011) | NO: 2021) |
| 18F9 | QSLLYSENNQDY | GAS | EQTYSYPYT |
| | (SEQ ID NO: 2002) | (SEQ ID | (SEQ ID |
| | | NO: 2012) | NO: 2022) |
| 15C5 | QSLLYSESNQDY | GAS | EQTYSYPYT |
| | (SEQ ID NO: 2003) | (SEQ ID | (SEQ ID |
| | | NO: 2013) | NO: 2023) |
| 1G6 | QSLLYSENKQDY | GAS | EQTYSYPYT |
| | (SEQ ID NO: 2004) | (SEQ ID | (SEQ ID |
| | | NO: 2014) | NO: 2024) |
| Consensus | QSLLYSENNQDY | GAS | EQTYSYPYT |
| | (SEQ ID NO: 2005) | (SEQ ID | (SEQ ID |
| | | NO: 2015) | NO: 2025) |

[0408] In some embodiments, each of the light chain variable regions and each of the heavy chain variable regions disclosed in in the above tables as well as specific combinations thereof and other embodiments of the anti-TREM2 antibody described in the '573 application and herein may be attached to the light chain constant regions (TABLE EN1) and heavy chain constant regions (TABLE EN2) to form complete antibody light and heavy chains, respectively, as further discussed below. Further, each of the generated heavy and light chain sequences may be combined to form a complete antibody structure. It should be understood that the heavy chain and light chain variable regions provided herein can also be attached to other constant domains having different sequences than the exemplary sequences listed herein.

G. PCT Patent Application Publication No. WO2019/055841A1

[0409] In some embodiments, the TREM2 agonist is an antibody or an antigen-binding fragment thereof, as described in PCT Patent Application Publication No. WO2019/055841A1 (“the '841 application”), which is incorporated by reference herein, in its entirety.

[0410] In some embodiments, the TREM2 binding agent comprises an antibody that comprises a light chain variable domain comprising a CDRL1, CDRL2, and CDRL3, and a heavy chain variable domain comprising a CDRH1, CDRH2, and CDRH3 disclosed in the '841 application specification. In some embodiments, the TREM2 binding agent comprises an antibody that comprises a light chain variable domain and a heavy chain variable domain disclosed in the '841 application specification.

[0411] In some embodiments, the antibody comprises one or more (e.g., one, two, three, four, five, or all six) CDRs selected from the group consisting of:
[0412] (a) a heavy chain CDR1 sequence having at least 90% sequence identity to the amino acid sequence of any one of SEQ ID NOS:2049, 2077, 2080, 2086, 2092, 2098, 2103, 2109, 2115, 2122, 2126, 2347, and 2355 or having up to two amino acid substitutions relative to the amino acid sequence of any one of SEQ ID NOS:2049, 2077, 2080, 2086, 2092, 2098, 2103, 2109, 2115, 2122, 2126, 2347, and 2355;
[0413] (b) a heavy chain CDR2 sequence having at least 90% sequence identity to the amino acid sequence of any one of SEQ ID NOS:2050, 2078, 2081, 2087, 2093, 2099, 2104, 2110, 2116, 2120, 2123, 2127, 2348, and 2356 or having up to two amino acid substitutions relative to the amino acid sequence of any one of SEQ ID NOS:2050, 2078, 2081, 2087, 2093, 2099, 2104, 2110, 2116, 2120, 2123, 2127, 2348, and 2356;
[0414] (c) a heavy chain CDR3 sequence having at least 90% sequence identity to the amino acid sequence of any one of SEQ ID NOS:2051, 2082, 2088, 2094, 2100, 2105, 2111, 2117, 2124, 2128, 2349, and 2357 or having up to two amino acid substitutions relative to the amino acid sequence of any one of SEQ ID NOS:2051, 2082, 2088, 2094, 2100, 2105, 2111, 2117, 2124, 2128, 2349, and 2357;
[0415] (d) a light chain CDR1 sequence having at least 90% sequence identity to the amino acid sequence of any one of SEQ ID NOS:2052, 2083, 2089, 2095, 2101, 2106, 2112, 2118, 2129, and 2351 or having up to two amino acid substitutions relative to the amino acid sequence of any one of SEQ ID NOS:2052, 2083, 2089, 2095, 2101, 2106, 2112, 2118, 2129, and 2351;
[0416] (e) a light chain CDR2 sequence having at least 90% sequence identity to the amino acid sequence of any one of SEQ ID NOS:2053, 2079, 2084, 2090, 2096, 2107, 2113, 2352, and 2359 or having up to two amino acid substitutions relative to the amino acid sequence of any one of SEQ ID NOS:2053, 2079, 2084, 2090, 2096, 2107, 2113, 2352, and 2359; and
[0417] (f) a light chain CDR3 sequence having at least 90% sequence identity to the amino acid sequence of any one of SEQ ID NOS:2054, 2085, 2091, 2097, 2102, 2108, 2114, 2119, 2121, 2125, 2130, and 2353 or having up to two amino acid substitutions relative to the amino acid sequence of any one of SEQ ID NOS:2054, 2085, 2091, 2097, 2102, 2108, 2114, 2119, 2121, 2125, 2130, and 2353.

[0418] In some embodiments, the antibody comprises:
[0419] (a) a heavy chain CDR1 sequence comprising the amino acid sequence of SEQ ID NO:2049, a heavy chain CDR2 sequence comprising the amino acid sequence of SEQ ID NO:2050, a heavy chain CDR3 sequence comprising the amino acid sequence of SEQ ID NO:2051, a light chain CDR1 sequence comprising the amino acid sequence of SEQ ID NO:2052, a light chain CDR2 sequence comprising the amino acid sequence of SEQ ID NO:2052, and a light chain CDR3 sequence comprising the amino acid sequence of SEQ ID NO:2053; or
[0420] (b) a heavy chain CDR1 sequence comprising the amino acid sequence of SEQ ID NO:2077, a heavy chain CDR2 sequence comprising the amino acid sequence of SEQ ID NO:2078, a heavy chain CDR3 sequence comprising the amino acid sequence of SEQ ID NO:2051, a light chain CDR1 sequence comprising the amino acid sequence of SEQ ID NO:2052, a light chain CDR2 sequence comprising the amino acid sequence of SEQ ID NO:2079, and a light chain CDR3 sequence comprising the amino acid sequence of SEQ ID NO:2054; or
[0421] (c) a heavy chain CDR1 sequence comprising the amino acid sequence of SEQ ID NO:2080, a heavy chain CDR2 sequence comprising the amino acid sequence of SEQ ID NO:2081, a heavy chain CDR3 sequence comprising the amino acid sequence of SEQ ID NO:2082, a light chain CDR1 sequence comprising the amino acid sequence of SEQ ID NO:2083, a light chain CDR2 sequence comprising the amino acid sequence of SEQ ID NO:2084, and a light chain CDR3 sequence comprising the amino acid sequence of SEQ ID NO:2085; or
[0422] (d) a heavy chain CDR1 sequence comprising the amino acid sequence of SEQ ID NO:2086, a heavy chain CDR2 sequence comprising the amino acid sequence of SEQ ID NO:2087, a heavy chain CDR3 sequence comprising the amino acid sequence of SEQ ID NO:2088, a light chain CDR1 sequence comprising the amino acid sequence of SEQ ID NO:2089, a light chain CDR2 sequence comprising the amino acid sequence of SEQ ID NO:2090, and a light chain CDR3 sequence comprising the amino acid sequence of SEQ ID NO:2091; or
[0423] (e) a heavy chain CDR1 sequence comprising the amino acid sequence of SEQ ID NO:2092, a heavy chain CDR2 sequence comprising the amino acid sequence of SEQ ID NO:2093, a heavy chain CDR3 sequence comprising the amino acid sequence of SEQ ID NO:2094, a light chain CDR1 sequence comprising the amino acid sequence of SEQ ID NO:2095, a light chain CDR2 sequence comprising the amino acid sequence of SEQ ID NO:2096, and a light chain CDR3 sequence comprising the amino acid sequence of SEQ ID NO:2097; or (f) a heavy chain CDR1 sequence comprising the amino acid sequence of SEQ ID NO:2098, a heavy chain CDR2 sequence comprising the amino acid sequence of SEQ ID NO:2099, a heavy chain CDR3 sequence comprising the amino acid sequence of SEQ ID NO:2100, a light chain CDR1 sequence comprising the amino acid sequence of SEQ ID NO:2101, a light chain CDR2 sequence comprising the amino acid sequence of SEQ ID NO:2079, and a light chain CDR3 sequence comprising the amino acid sequence of SEQ ID NO:2102; or
[0424] (g) a heavy chain CDR1 sequence comprising the amino acid sequence of SEQ ID NO:2103, a heavy chain CDR2 sequence comprising the amino acid sequence of SEQ ID NO:2104, a heavy chain CDR3 sequence comprising the amino acid sequence of SEQ ID NO:2105, a light chain CDR1 sequence comprising the amino acid sequence of SEQ ID NO:2106, a light chain CDR2 sequence comprising the amino acid sequence of SEQ ID NO:2107, and a light chain CDR3 sequence comprising the amino acid sequence of SEQ ID NO:2108; or
[0425] (h) a heavy chain CDR1 sequence comprising the amino acid sequence of SEQ ID NO:2109, a heavy chain CDR2 sequence comprising the amino acid sequence of SEQ ID NO:2110, a heavy chain CDR3 sequence comprising the amino acid sequence of SEQ ID NO:2111, a light chain CDR1 sequence comprising the amino acid sequence of SEQ ID NO:2112, a light chain CDR2 sequence comprising the amino acid sequence of SEQ ID NO:2113, and a light chain CDR3 sequence comprising the amino acid sequence of SEQ ID NO:2114; or
[0426] (i) a heavy chain CDR1 sequence comprising the amino acid sequence of SEQ ID NO:2115, a heavy chain CDR2 sequence comprising the amino acid sequence of SEQ ID NO:2116, a heavy chain CDR3 sequence comprising the amino acid sequence of SEQ ID NO:2117, a light chain CDR1 sequence comprising the amino acid sequence of SEQ ID NO:2118, a light chain CDR2 sequence comprising the amino acid sequence of SEQ ID NO:2119, and a light chain CDR3 sequence comprising the amino acid sequence of SEQ ID NO:2119; or
[0427] (j) a heavy chain CDR1 sequence comprising the amino acid sequence of SEQ ID NO:2115, a heavy chain CDR2 sequence comprising the amino acid sequence of SEQ ID NO:2120, a heavy chain CDR3 sequence comprising the amino acid sequence of SEQ ID NO:2117, a light chain CDR1 sequence comprising the amino acid sequence of SEQ ID NO:2118, a light chain CDR2 sequence comprising the amino acid sequence of SEQ ID NO:2079, and a light chain CDR3 sequence comprising the amino acid sequence of SEQ ID NO:2121; or
[0428] (k) a heavy chain CDR1 sequence comprising the amino acid sequence of SEQ ID NO:2123, a heavy chain CDR2 sequence comprising the amino acid sequence of SEQ ID NO:2132, a heavy chain CDR3 sequence comprising the amino acid sequence of SEQ ID NO:2133, a light chain CDR1 sequence comprising the amino acid sequence of SEQ ID NO:2102, a light chain CDR2 sequence comprising the amino acid sequence of SEQ ID NO:2079, and a light chain CDR3 sequence comprising the amino acid sequence of SEQ ID NO:2125; or
[0429] (l) a heavy chain CDR1 sequence comprising the amino acid sequence of SEQ ID NO:2126, a heavy chain CDR2 sequence comprising the amino acid sequence of SEQ ID NO:2127, a heavy chain CDR3 sequence comprising the amino acid sequence of SEQ ID NO:2128, a light chain CDR1 sequence comprising the amino acid sequence of SEQ ID NO:2129, a light chain CDR2 sequence comprising the amino acid sequence of SEQ ID NO:2079, and a light chain CDR3 sequence comprising the amino acid sequence of SEQ ID NO:2130; or
[0430] (m) a heavy chain CDR1 sequence comprising the amino acid sequence of SEQ ID NO:2347, a heavy chain CDR2 sequence comprising the amino acid sequence of SEQ ID NO:2348, a heavy chain CDR3 sequence comprising the amino acid sequence of SEQ ID NO:2349, a light chain CDR1 sequence comprising the amino acid sequence of SEQ ID NO:2351, a light chain CDR2 sequence comprising the amino acid sequence of SEQ ID NO:2352, and a light chain CDR3 sequence comprising the amino acid sequence of SEQ ID NO:2353; or
[0431] (n) a heavy chain CDR1 sequence comprising the amino acid sequence of SEQ ID NO:2355, a heavy chain CDR2 sequence comprising the amino acid sequence of SEQ ID NO:2356, a heavy chain CDR3 sequence comprising the amino acid sequence of SEQ ID NO:2357, a light chain CDR1 sequence comprising the amino acid sequence of SEQ ID NO:2089, a light chain CDR2 sequence comprising the amino acid sequence of SEQ ID NO:2359, and a light chain CDR3 sequence comprising the amino acid sequence of SEQ ID NO:2091.

[0432] In some embodiments, the antibody or antigen-binding portion thereof comprises:
[0433] (a) a heavy chain variable region comprising an amino acid sequence that has at least 90% sequence identity to SEQ ID NO:2047; and a light chain variable region comprising an amino acid sequence that has at least 90% sequence identity to SEQ ID NO:2048; or
[0434] (b) a heavy chain variable region comprising an amino acid sequence that has at least 90% sequence identity to SEQ ID NO:2055; and a light chain variable region comprising an amino acid sequence that has at least 90% sequence identity to SEQ ID NO:2066; or
[0435] (c) a heavy chain variable region comprising an amino acid sequence that has at least 90% sequence identity to SEQ ID NO:2056; and a light chain variable region comprising an amino acid sequence that has at least 90% sequence identity to SEQ ID NO:2067; or
[0436] (d) a heavy chain variable region comprising an amino acid sequence that has at least 90% sequence identity to SEQ ID NO:2057; and a light chain variable region comprising an amino acid sequence that has at least 90% sequence identity to SEQ ID NO:2068; or
[0437] (e) a heavy chain variable region comprising an amino acid sequence that has at least 90% sequence identity to SEQ ID NO:2058; and a light chain variable region comprising an amino acid sequence that has at least 90% sequence identity to SEQ ID NO:2069; or
[0438] (f) a heavy chain variable region comprising an amino acid sequence that has at least 90% sequence identity to SEQ ID NO:2059; and a light chain variable region comprising an amino acid sequence that has at least 90% sequence identity to SEQ ID NO:2070; or
[0439] (g) a heavy chain variable region comprising an amino acid sequence that has at least 90% sequence identity to SEQ ID NO:2060; and a light chain variable region comprising an amino acid sequence that has at least 90% sequence identity to SEQ ID NO:2071; or
[0440] (h) a heavy chain variable region comprising an amino acid sequence that has at least 90% sequence identity to SEQ ID NO:2061; and a light chain variable region comprising an amino acid sequence that has at least 90% sequence identity to SEQ ID NO:2072; or
[0441] (i) a heavy chain variable region comprising an amino acid sequence that has at least 90% sequence identity to SEQ ID NO:2062; and a light chain variable region comprising an amino acid sequence that has at least 90% sequence identity to SEQ ID NO:2073; or
[0442] (j) a heavy chain variable region comprising an amino acid sequence that has at least 90% sequence identity to SEQ ID NO:2063; and a light chain variable region comprising an amino acid sequence that has at least 90% sequence identity to SEQ ID NO:2074; or
[0443] (k) a heavy chain variable region comprising an amino acid sequence that has at least 90% sequence identity to SEQ ID NO:2064; and a light chain variable region comprising an amino acid sequence that has at least 90% sequence identity to SEQ ID NO:2075; or
[0444] (l) a heavy chain variable region comprising an amino acid sequence that has at least 90% sequence identity to SEQ ID NO:2065; and a light chain variable region comprising an amino acid sequence that has at least 90% sequence identity to SEQ ID NO:2076; or
[0445] (m) a heavy chain variable region comprising an amino acid sequence that has at least 90% sequence identity to SEQ ID NO:2346, and a light chain variable region comprising an amino acid sequence that has at least 90% sequence identity to SEQ ID NO:2350; or
[0446] (n) a heavy chain variable region comprising an amino acid sequence that has at least 90% sequence identity to SEQ ID NO:2354, and a light chain variable region comprising an amino acid sequence that has at least 90% sequence identity to SEQ ID NO:2358.

[0447] In some embodiments, the antibody is an antibody disclosed in Table 15 ofPCT Patent Application Publication No. WO2019/05584A1, reproduced as TABLE G1 below. In some embodiments, the antibody is an antibody comprises a light chain variable domain comprising a CDRL1, CDRL2, and CDRL3, and a heavy chain variable domain comprising a CDRH1, CDRH2, and CDRH3 disclosed in TABLE G1.

TABLE G1

| Description | Sequence |
|---|---|
| muIgG1 3′ primer | GGACAGGGATCCAGAGTTCC (SEQ ID NO: 2042) |
| muIgG2 3′ primer | AGCTGGGAAGGTGTGCACAC (SEQ ID NO: 2043) |
| muIgG3 3′ primer | CAGGGGCCAGTGGATAGAC (SEQ ID NO: 2044) |
| muCkappa.1 3′ | GACATTGATGTCTTTGGGGT (SEQ ID NO: 2045) |
| primer | |
| muCkappa.2 3′ | TTCACTGCCATCAATCTTCC (SEQ ID NO: 2046) |
| primer | |
| R59.F6 VH amino | QVQLQQPGAELVKPGASVKLSCKASGYTFTSYWMHWVKQSPGRGLE |
| acid sequence | WIGRSDPTTGGTNYNEKFKTKATLTVDKPSSTAYMQLSSLTSDDSAV |
| | YYCVRTSGTGDYWGQGTSLTVSSAKTTAPSVYPLAPVCGGTTGSSVT |
| | (SEQ ID NO: 2047) |
| R59.F6 VL amino | DVVMTQTPLSLPVSLGDQASISCRSSQSLVHNNGNTFLHWYLQKPGQ |
| acid sequence | SPKWYkVSNRFSGVPDRFSGSGSGTDFTLKISRVEAEDLGVYFCSQTT |
| | HVPPTFGGGTKLEIKRADAAPTVSIFPPSSEQLTSGGASVVCF |
| | (SEQ ID NO: 2048) |
| R59.F6 CDR-H1 | GYTFTSY (SEQ ID NO: 2049) |
| amino acid sequence | |
| R59.F6 CDR-H2 | IGRSDPTTGGTNYNE (SEQ ID NO: 2050) |
| amino acid sequence | |
| R59.F6 and RS.F10 | VRTSGTGDY (SEQ ID NO: 2051) |
| CDR-H3 amino acid | |
| sequence | |
| R59.F6 and RS.F10 | RSSQSLVHNNGNTFLH (SEQ ID NO: 2052) |
| CDR-L1 amino acid | |
| sequence | |
| R59.F6 CDR-L2 | VSNRFS (SEQ ID NO: 2053) |
| amino acid sequence | |
| R59.F6 and RS.F10 | SQTTHVPPT (SEQ ID NO: 2054) |
| CDR-L3 amino acid | |
| sequence | |
| 21D11 VH amino | QVQLQQSGAELARPGASVKLSCKASGYTFTSYWIQWVKQRPGQGLE |
| acid sequence | WIGTIYPGDGDARYTQKFKGKATLTADKSSSTTYMQLNSLASEDSAV |
| | YYCARNGITTAGYYAMDYWGQGTSVTVSS (SEQ ID NO: 2055) |
| 21D4.D1 VH amino | QVQLQQSGADLLRPGVSVKISCKGSGYTFTDHAMHWVKQSHAESLE |
| acid sequence | WIGVISTYSGDTGYNQKFKGKATMTVDKSSSTAYLELARLTSEDSAIY |
| | YCAREGHYDDAMDYWGQGTSVTVSS (SEQ ID NO: 2056) |
| 26D2 VH amino acid | EVQLQQSGPELVKPGASVKMSCKASGYTFTSYVMHWVKQKPGQGLE |
| sequence | WIGYINPYTDGTKYNEKFKGKATLTSDKSSSTAYMDLSSLTSEDSAVY |
| | YCARGEVRRYALDYWGQGTSVTVSS (SEQ ID NO: 2057) |
| 26E2.A3 VH amino | QVHLQQSGSELRSPGSSVKLSCKDFDSEVFPISYMSWIRQKPGHGFEW |
| acid sequence; | IGDILPSIGGRIYGVKFEDRATLDADTVSNTAYLELNSLTSEDSAIYYC |
| 24B4.A1 VH amino | ARKDYGSLAYWGQGTLVTVSA (SEQ ID NO: 2058) |
| acid sequence | |
| 3D3.A1 VH amino | EVQLQQSGPELVKPGASVKISCKTSGYTLSEYTMHWVIQSHGKSLEWI |
| acid sequence | GGVIPNSGGTSYNQKFRDKASLTVDKSSSTAYLELRSLTSEDSAVYYC |
| | ARGDDSYRRGYALDYWGQGTSVTVSS (SEQ ID NO: 2059) |
| 40H3.A4 VH amino | EVQLQQSGAEVVKPGASVKLSCTASGFNIKDTYMHWVKQRPEQGLE |
| acid sequence | WIGRIDPANGNTKYDPKFQGKATITADTSSNTAYLQLSSLTSEDTAVY |
| | YCATLFAYWGQGTLVTVSA (SEQ ID NO: 2060) |
| 42E8.H1 VH amino | DVQLQESGPGLVKPSQSLSLTCTVTGYSITSDYAWNWIRQFPGNKLE |
| acid sequence | WMGYINYSGRTIYNPSLKSRISITRDTSKNHFFLQLISVTTEDTATYYC |
| | ARWNGNYGFAYWGQGTLVTVSA (SEQ ID NO: 2061) |
| 49H1 LB1 VH amino | DVQLQESGPGLVKPSQSLSLTCTVTGYSITSDYAWNWIRQFPGNRLE |
| acid sequence | WMGYISFSGSTSYNPSLKSRISITRDTSKNQFFLQLNSVTTEDTATYYC |
| | ARWNGNYGFAYWGQGTLVTVSA (SEQ ID NO: 2062) |
| 54C2.A1 VH amino | QVHLQQSGSELRSPGSSVKLSCKDFDSEVFPIAYMSWVRQKPGHGFE |
| acid sequence | WIGDILPSIGRRIYGVKFEDKATLDADTVSNTAYLELNSLTSEDSAIYY |
| | CTRKDYGSLAYWGQGTLVTVSA (SEQ ID NO: 2063) |
| 57D7.A1 VH amino | QVQLKESGPGLVAPSQSLSITCTVSGFSLSRYSVYWVRQPPGKGLEWL |
| acid sequence | GMIWGGGNTDYNSALKSRLSISKDNSKSQVFLKMNSLQTDDSAMYY |
| | CVQYGGMDYWGQGTSVTVSS (SEQ ID NO: 2064) |
| RS9.F6 VH amino | QVQLQQPGAELVKPGASVKLSCKASGYTFTSYWMHWVKQSPGRGLE |
| acid sequence; | WIGRSDPTTGGTNYNEKFKTKATLTVDKPSSTAYMQLSSLTSDDSAV |
| RS.F10 VH amino | YYCVRTSGTGDYWGQGTSLTVSS (SEQ ID NO: 2065) |
| acid sequence | |
| 2ID11 VL amino | DIQMTQSPASLSVSVGETVTITCRASENIYSNLAWYQQKQGRSPQLLV |
| acid sequence | YAATNLADGVPSRFSGSGSGTQYSLKINSLQSEDFGYYYCQHFWGTP |
| | YTFGGGTKVEIK (SEQ ID NO: 2066) |
| 21D4.D1 VL amino | DVVMTQTPLTLSVTIGQPASFSCKSSQSLLDSDGKTYLNWLLRRPGQS |
| acid sequence | PKRLIYVVSKLDSGVPDRFTGSGSGTDFTLKISRVEAEDLGVYYCWQG |
| | THFPYTFGGGTKLEIK (SEQ ID NO: 2067) |
| 26D2 VL amino acid | DIQMTQSSSSFSVSLGDRVTITCKASEDIYNRLAWYQQKPGNAPRLLIS |
| sequence | GATSLETGVPSRFSGSGSGKDYTLSITSLQTEDVATYYCQQYWSTPWT |
| | FGGGTKLEIK (SEQ ID NO: 2068) |
| 26E2.A3 VL amino | DVVMTQTPLSLPVSLGDQASISCRSSQSLVHINGNTYLQWFLQKPGQS |
| acid sequence; | PKLLIYKVSNRFSGVPDRFSGSGSGTAFTLKISRVEAEDLGVYFCSQST |
| 24B4.A1 VL amino | HVPYTFGGGTKLEIK (SEQ ID NO: 2069) |
| acid sequence | |
| 3D3.A1 VL amino | DIVMSQSPSSLAVSVGEKVTMSCKSSQSLLYSSNQKSYLAWYQQKPG |
| acid sequence | QSPKLLIYWASTRESGVPDRFRGSGSGTDFTLTISSVKAEDLAVYYCQ |
| | QYFSYPPTFGGGTKLEIK (SEQ ID NO: 2070) |
| 40H3.A4 VL amino | DIVMTQAAFSNPVTLGTSASISCRSSKSLLHSNGITYLYWYLQKPGQSP |
| acid sequence | QLLIYQMSNLASGVPDRFSSSGSGIDFTLRINRVEAEDVGVYYCAQNL |
| | ELPTFGSGTKLEIK (SEQ ID NO: 2071) |
| 42E8.H1 VL amino | DVVMTQNPLSLPVSLGDQASISCRSSQSLVHINGNTYLHWYLQKPGQS |
| acid sequence | PKWYKVSNRFSGVPDRFSGSGSGTDFTLKISRVEAEDLGVYFCSQTT |
| | HALFTFGSGTKLEIK (SEQ ID NO: 2072) |
| 49H1 LB 1 VL amino | DVVMTQTPLSLPVSLGDQASISCRSSQSLVHINGNTYLHWYLQKPGQS |
| acid sequence | PKLLIYKVSNRFSGVPDRFSGSGSGTDFTLKISRVEAEDLGVYFCSQST |
| | HVTFTFGSGTKLEIK (SEQ ID NO: 2073) |
| 54C2.A1 VL amino | DVVMTQTPLSLPVSLGDQASISCRSSQSLVHINGNTYLQWYLQKPGQS |
| acid | PKLLIYKVSNRFSGVPDRFSGSGSGTDFTLRISRVEAEDLGVYFCSQST |
| | HLPYTFGGGTKLEIK (SEQ ID NO: 2074) |
| 57D7.A1 VL amino | DVLMTQTPLSLPVSLGDQASISCRSSQSIVHSNGNTYLEWYLQKPGQS |
| acid sequence | PKWYKVSNRFSGVPDRFSGSGSGTDFTLKISRVEAEDLGVYYCFQGS |
| | HVPYTFGGGTKLEIK (SEQ ID NO: 2075) |
| RS9.F6 VL amino | DVVMTQTPLSLPVSLGDQASISCRSSQSLVHNNGNTFLHWYLQKPGQ |
| acid sequence; | SPKWYKVSNRFSGVPDRFSGSGSGTDFTLKISRVEAEDLGVYFCSQT |
| RS.F10 VL amino | THVPPTFGGGTKLEIK (SEQ ID NO: 2076) |
| acid sequence | |
| RS9.F6 and RS.F10 | GYTFTSYWMH (SEQ ID NO: 2077) |
| CDR-H1 | |
| R59.F6 and RS.F10 | RSDPTTGGTNYNEKFKT (SEQ ID NO: 2078) |
| CDR-H2 | |
| RS9.F6. RS.F10, | KVSNRFS (SEQ ID NO: 2079) |
| 26E2.A3, 24B4.A1, | |
| 42E8.H1, 49H11.B1, | |
| 54C2.A1, and | |
| 57D7.A1 CDR-L2 | |
| 2ID11 CDR-H1 | GYTFTSYWIQ (SEQ ID NO: 2080) |
| 2ID11 CDR-H2 | TIYPGDGDARYTQKFKG (SEQ ID NO: 2081) |
| 2ID11 CDR-H3 | ARNGITTAGYYAMDY (SEQ ID NO: 2082) |
| 2ID11 CDR-L1 | RASENIYSNLA (SEQ ID NO: 2083) |
| 2ID11 CDR-L2 | AATNLAD (SEQ ID NO: 2084) |
| 2ID11 CDR-L3 | QHFWGTPYT (SEQ ID NO: 2085) |
| 21D4.D1 CDR-H1 | GYTFTDHAMH (SEQ ID NO: 2086) |
| 21D4.D1 CDR-H2 | VISTYSGDTGYNQKFKG (SEQ ID NO: 2087) |
| 21D4.D1 CDR-H3 | AREGHYDDAMDY (SEQ ID NO: 2088) |
| 21D4.D1 and 51D4 | KSSQSLLDSDGKTYLN (SEQ ID NO: 2089) |
| CDR-L1 | |
| 21D4.D1 CDR-L2 | VVSKLDS (SEQ ID NO: 2090) |
| 21D4.D1 and 51D4 | WQGTFIFPYT (SEQ ID NO: 2091) |
| CDR-L3 | |
| 26D2 CDR-H1 | GYTFTSYVMH (SEQ ID NO: 2092) |
| 26D2 CDR-H2 | YINPYTDGTKYNEKFKG (SEQ ID NO: 2093) |
| 26D2 CDR-H3 | ARGEVRRYALDY (SEQ ID NO: 2094) |
| 26D2 CDR-L1 | KASEDIYNRLA (SEQ ID NO: 2095) |
| 26D2 CDR-L2 | GATSLET (SEQ ID NO: 2096) |
| 26D2 CDR-L3 | QQYWSTPWT (SEQ ID NO: 2097) |
| 26E2.A3 and | DSEVFPISYMS (SEQ ID NO: 2098) |
| 24B4.A1 CDR-H1 | |
| 26E2.A3 and | DILPSIGGRIYGVKF (SEQ ID NO: 2099) |
| 24B4.A1 CDR-H2 | |
| 26E2.A3 and | ARKDYGSLAY (SEQ ID NO: 2100) |
| 24B4.A1 CDR-H3 | |
| 26E2.A3, 24B4.A1, | RSSQSLVHINGNTYLQ (SEQ ID NO: 2101) |
| and 54C2.A1 CDR-Ll | |
| 26E2.A3 and | SQSTHVPYT (SEQ ID NO: 2102) |
| 24B4.A1 CDR-L3 | |
| 3D3.A1 CDR-H1 | GYTLSEYTMH (SEQ ID NO: 2103) |
| 3D3.A1 CDR-H2 | GVIPNSGGTSYNQKFRD (SEQ ID NO: 2104) |
| 3D3.A1 CDR-H3 | ARGDDSYRRGYALDY (SEQ ID NO: 2105) |
| 3D3.A1 CDR-L1 | KSSQSLLYSSNQKSYLA (SEQ ID NO: 2106) |
| 3D3.A1 CDR-L2 | WASTRES (SEQ ID NO: 2107) |
| 3D3.A1 CDR-L3 | QQYFSYPPT (SEQ ID NO: 2108) |
| 40H3.A4 CDR-H1 | GFNIKDTYMH (SEQ ID NO: 2109) |
| 40H3.A4 CDR-H2 | RIDPANGNTKYDPKFQG (SEQ ID NO: 2110) |
| 40H3.A4 CDR-H3 | ATLFAY (SEQ ID NO: 2111) |
| 40H3.A4 CDR-L1 | RSSKSLLHSNGITYLY (SEQ ID NO: 2112) |
| 40H3.A4 CDR-L2 | QMSNLAS (SEQ ID NO: 2113) |
| 40H3.A4 CDR-L3 | AQNLELPT (SEQ ID NO: 2114) |
| 42E8.H1 and 49H11.B1 | GYSITSDYAWN (SEQ ID NO: 2115) |
| CDR-H1 | |
| 42E8.H1 CDR-H2 | YINYSGRTIYNPSLKS (SEQ ID NO: 2116) |
| 42E8.H1 and 49H11.B1 | ARWNGNYGFAY (SEQ ID NO: 2117) |
| CDR-H3 | |
| 42E8.H1 and 49H11.B1 | RSSQSLVHINGNTYLH (SEQ ID NO: 2118) |
| CDR-L1 | |
| 42E8.H1 CDR-L3 | SQTTHALFT (SEQ ID NO: 2119) |
| 49H11.B1 CDR-H2 | YISFSGSTSYNPSLKS (SEQ ID NO: 2120) |
| 49H11.B1 CDR-L3 | SQSTHVTFT (SEQ ID NO: 2121) |
| 54C2.A1 CDR-H1 | DSEVFPIAYMS (SEQ ID NO: 2122) |
| 54C2.A1 CDR-H2 | DILPSIGRRIYGVKFED (SEQ ID NO: 2123) |
| 54C2.A1 CDR-H3 | KDYGSLAY (SEQ ID NO: 2124) |
| 54C2.A1 CDR-L3 | SQSTHLPYT (SEQ ID NO: 2125) |
| 57D7.A1 CDR-H1 | GFSLSRYSVY (SEQ ID NO: 2126) |
| 57D7.A1 CDR-H2 | MIWGGGNTDYNSALKS (SEQ ID NO: 2127) |
| 57D7.A1 CDR-H3 | YGGMDY (SEQ ID NO: 2128) |
| 57D7.A1 CDR-L1 | RSSQSIVHSNGNTYLE (SEQ ID NO: 2129) |
| 57D7.A1 CDR-L3 | FQGSHVPYT (SEQ ID NO: 2130) |
| RS9.F6-Fd | QVQLQQPGAELVKPGASVKLSCKASGYTFTSYWMHWVKQSPGRGLE |
| | WIGRSDPTTGGTNYNEKFKTKATLTVDKPSSTAYMQLSSLTSDDSAV |
| | YYCVRTSGTGDYWGQGTSLTVSSASTKGPSVFPLAPSSKSTSGGTAAL |
| | GCLVKDYFPEPVTVSWNSGALTSGVHTFPAVLQSSGLYSLSSVVTVPS |
| | SSLGTQTYICNVNHKPSNTKVDKKVEPKSCDKTH (SEQ ID NO: 2131) |
| RS9.F6-Fd fused to | QVQLQQPGAELVKPGASVKLSCKASGYTFTSYWMHWVKQSPGRGLE |
| Fc with LALAPG, | WIGRSDPTTGGTNYNEKFKTKATLTVDKPSSTAYMQLSSLTSDDSAV |
| TfR binding, and | YYCVRTSGTGDYWGQGTSLTVSSASTKGPSVFPLAPSSKSTSGGTAAL |
| knob mutations | GCLVKDYFPEPVTVSWNSGALTSGVHTFPAVLQSSGLYSLSSVVTVPS |
| | SSLGTQTYICNVNHKPSNTKVDKKVEPKSCDKTHTCPPCPAPEAAGGP |
| | SVFLFPPKPKDTLMISRTPEVTCVVVDVSHEDPEVKFNWYVDGVEVH |
| | NAKTKPREEQYNSTYRVVSVLTVLHQDWLNGKEYKCKVSNKALGAP |
| | IEKTISKAKGQPREPQVYTLPPSRDELTKNQVSLWCLVKGFYPSDIAVL |
| | WESYGTEWASYKTTPPVLDSDGSFFLYSKLTVTKEEWQQGFVFSCSV |
| | MHEALHNHYTQKSLSLSPGK (SEQ ID NO: 2132) |
| RS9.F6-Fd fused to | QVQLQQPGAELVKPGASVKLSCKASGYTFTSYWMHWVKQSPGRGLE |
| Fc with LALAPG and | WIGRSDPTTGGTNYNEKFKTKATLTVDKPSSTAYMQLSSLTSDDSAV |
| hole mutations | YYCVRTSGTGDYWGQGTSLTVSSASTKGPSVFPLAPSSKSTSGGTAAL |
| | GCLVKDYFPEPVTVSWNSGALTSGVHTFPAVLQSSGLYSLSSVVTVPS |
| | SSLGTQTYICNVNHKPSNTKVDKKVEPKSCDKTHTCPPCPAPEAAGGP |
| | SVFLFPPKPKDTLMISRTPEVTCVVVDVSHEDPEVKFNWYVDGVEVH |
| | NAKTKPREEQYNSTYRVVSVLTVLHQDWLNGKEYKCKVSNKALGAP |
| | IEKTISKAKGQPREPQVYTLPPSRDELTKNQVSLSCAVKGFYPSDIAVE |
| | WESNGQPENNYKTTPPVLDSDGSFFLVSKLTVDKSRWQQGNVFSCSV |
| | MHEALHNHYTQKSLSLSPGK (SEQ ID NO: 2133) |
| 3D3.A1-Fd | EVQLQQSGPELVKPGASVKISCKTSGYTLSEYTMHWVIQSHGKSLEWI |
| | GGVIPNSGGTSYNQKFRDKASLTVDKSSSTAYLELRSLTSEDSAVYYC |
| | ARGDDSYRRGYALDYWGQGTSVTVSSASTKGPSVFPLAPSSKSTSGG |
| | TAALGCLVKDYFPEPVTVSWNSGALTSGVHTFPAVLQSSGLYSLSSVV |
| | TVPSSSLGTQTYICNVNHKPSNTKVDKKVEPKSCDKTH |
| | (SEQ ID NO: 2134) |
| 3D3.A1-Fd fused to | EVQLQQSGPELVKPGASVKISCKTSGYTLSEYTMHWVIQSHGKSLEWI |
| Fc with LALAPG, | GGVIPNSGGTSYNQKFRDKASLTVDKSSSTAYLELRSLTSEDSAVYYC |
| TfR binding, and | ARGDDSYRRGYALDYWGQGTSVTVSSASTKGPSVFPLAPSSKSTSGG |
| knob mutations | TAALGCLVKDYFPEPVTVSWNSGALTSGVHTFPAVLQSSGLYSLSSVV |
| | TVPSSSLGTQTYICNVNHKPSNTKVDKKVEPKSCDKTHTCPPCPAPEA |
| | AGGPSVFLFPPKPKDTLMISRTPEVTCVVVDVSHEDPEVKFNWYVDG |
| | VEVHNAKTKPREEQYNSTYRVVSVLTVLHQDWLNGKEYKCKVSNK |
| | ALGAPIEKTISKAKGQPREPQVYTLPPSRDELTKNQVSLWCLVKGFYP |
| | SDIAVLWESYGTEWASYKTTPPVLDSDGSFFLYSKLTVTKEEWQQGF |
| | VFSCSVMHEALHNHYTQKSLSLSPGK (SEQ ID NO: 2135) |
| 3D3.A1-Fd fused to | EVQLQQSGPELVKPGASVKISCKTSGYTLSEYTMHWVIQSHGKSLEWI |
| Fc with LALAPG and | GGVIPNSGGTSYNQKFRDKASLTVDKSSSTAYLELRSLTSEDSAVYYC |
| hole mutations | ARGDDSYRRGYALDYWGQGTSVTVSSASTKGPSVFPLAPSSKSTSGG |
| | TAALGCLVKDYFPEPVTVSWNSGALTSGVHTFPAVLQSSGLYSLSSVV |
| | TVPSSSLGTQTYICNVNHKPSNTKVDKKVEPKSCDKTHTCPPCPAPEA |
| | AGGPSVFLFPPKPKDTLMISRTPEVTCVVVDVSHEDPEVKFNWYVDG |
| | VEVHNAKTKPREEQYNSTYRVVSVLTVLHQDWLNGKEYKCKVSNK |
| | ALGAPIEKTISKAKGQPREPQVYTLPPSRDELTKNQVSLSCAVKGFYPS |
| | DIAVEWESNGQPENNYKTTPPVLDSDGSFFLVSKLTVDKSRWQQGNV |
| | FSCSVMHEALHNHYTQKSLSLSPGK (SEQ ID NO: 2136) |
| Human TREM2 | MEPLRLLILLFVTELSGAHNTTVFQGVAGQSLQVSCPYDSMKH |
| protein | WGRRKAWCRQLGEKGPCQRVVSTHNLWLLSFLRRWNGSTAIT |
| | DDTLGGTLTITLRNLQPHDAGLYQCQSLHGSEADTLRKVLVEVL |
| | ADPLDHRDAGDLWFPGESESFEDAHVEHSISRSLLEGEIPFPPTSI |
| | LLLLACIFLIKILAASALWAAAWHGQKPGTHPPSELDCGHDPGY |
| | QLQTLPGLRDT (SEQ ID NO: 1) |
| Human transferrin | MMDQARSAFSNLFGGEPLSYTRFSLARQVDGDNSHVEMKLAVDEEE |
| receptor protein 1 | NADNNTKANVTKPKRCSGSICYGTIAVIVFFLIGFMIGYLGYCKGVEP |
| (TFR1) | KTECERLAGTESPVREEPGEDFPAARRLYWDDLKRKLSEKLDSTDFTG |
| | TIKLLNENSYVPREAGSQKDENLALYVENQFREFKLSKVWRDQHFVK |
| | IQVKDSAQNSVIIVDKNGRLVYLVENPGGYVAYSKAATVTGKLVHAN |
| | FGTKKDFEDLYTPVNGSIVIVRAGKITFAEKVANAESLNAIGVLIYMD |
| | QTKFPIVNAELSFFGHAHLGTGDPYTPGFPSFNHTQFPPSRSSGLPNIPV |
| | QTISRAAAEKLFGNMEGDCPSDWKTDSTCRMVTSESKNVKLTVSNVL |
| | KEIKILNIFGVIKGFVEPDHYVVVGAQRDAWGPGAAKSGVGTALLLK |
| | LAQMFSDMVLKDGFQPSRSIIFASWSAGDFGSVGATEWLEGYLSSLHL |
| | KAFTYINLDKAVLGTSNFKVSASPLLYTLIEKTMQNVKHPVTGQFLYQ |
| | DSNWASKVEKLTLDNAAFPFLAYSGIPAVSFCFCEDTDYPYLGTTMD |
| | TYKELIERIPELNKVARAAAEVAGQFVIKLTHDVELNLDYERYNSQLL |
| | SFVRDLNQYRADIKEMGLSLQWLYSARGDFFRATSRLTTDFGNAEKT |
| | DRFVMKKLNDRVMRVEYHFLSPYVSPKESPFRHVFWGSGSHTLPALL |
| | ENLKLRKQNNGAFNETLFRNQLALATWTIQGAANALSGDVWDIDNE |
| | F (SEQ ID NO: 2137) |
| Wild-type human Fc | APELLGGPSVFLFPPKPKDTLMISRTPEVTCVVVDVSHEDPEVKFNWY |
| sequence posifions | VDGVEVHNAKTKPREEQYNSTYRVVSVLTVLHQDWLNGKEYKCKV |
| 231-447 EU index | SNKALPAPIEKTISKAKGQPREPQVYTLPPSRDELTKNQVSLTCLVKGF |
| numbering | YPSDIAVEWESNGQPENNYKTTPPVLDSDGSFFLYSKLTVDKSRWQQ |
| | GNVFSCSVMHEALHNHYTQKSLSLSPGK (SEQ ID NO: 2138) |
| Human IgG1 hinge | EPKSCDKTHTCPPCP (SEQ ID NO: 2139) |
| sequence | |
| Clone CH3C.35.20 | APELLGGPSVFLFPPKPKDTLMISRTPEVTCVVVDVSHEDPEVKFNWY |
| | VDGVEVHNAKTKPREEQYNSTYRVVSVLTVLHQDWLNGKEYKCKV |
| | SNKALPAPIEKTISKAKGQPREPQVYTLPPSRDELTKNQVSLTCLVKGF |
| | YPSDIAVEWESYGTEWSSYKTTPPVLDSDGSFFLYSKLTVTKEEWQQ |
| | GFVFSCSVMHEALHNHYTQKSLSLSPGK (SEQ ID NO: 2140) |
| Clone CH3C.35.21 | APELLGGPSVFLFPPKPKDTLMISRTPEVTCVVVDVSHEDPEVKFNWY |
| | VDGVEVHNAKTKPREEQYNSTYRVVSVLTVLHQDWLNGKEYKCKV |
| | SNKALPAPIEKTISKAKGQPREPQVYTLPPSRDELTKNQVSLTCLVKGF |
| | YPSDIAVWWESYGTEWSSYKTTPPVLDSDGSFFLYSKLTVTKEEWQQ |
| | GFVFSCSVMHEALHNHYTQKSLSLSPGK (SEQ ID NO: 2141) |
| Clone CH3C.35.22 | APELLGGPSVFLFPPKPKDTLMISRTPEVTCVVVDVSHEDPEVKFNWY |
| | VDGVEVHNAKTKPREEQYNSTYRVVSVLTVLHQDWLNGKEYKCKV |
| | SNKALPAPIEKTISKAKGQPREPQVYTLPPSRDELTKNQVSLTCLVKGF |
| | YPSDIAVWWESYGTEWSNYKTTPPVLDSDGSFFLYSKLTVTKSEWQQ |
| | GFVFSCSVMHEALHNHYTQKSLSLSPGK (SEQ ID NO: 2142) |
| Clone CH3C.35.23 | APELLGGPSVFLFPPKPKDTLMISRTPEVTCVVVDVSHEDPEVKFNWY |
| | VDGVEVHNAKTKPREEQYNSTYRVVSVLTVLHQDWLNGKEYKCKV |
| | SNKALPAPIEKTISKAKGQPREPQVYTLPPSRDELTKNQVSLTCLVKGF |
| | YPSDIAVEWESYGTEWSNYKTTPPVLDSDGSFFLYSKLTVTKEEWQQ |
| | GFVFSCSVMHEALHNHYTQKSLSLSPGK (SEQ ID NO: 2143) |
| Clone CH3C.35.24 | APELLGGPSVFLFPPKPKDTLMISRTPEVTCVVVDVSHEDPEVKFNWY |
| | VDGVEVHNAKTKPREEQYNSTYRVVSVLTVLHQDWLNGKEYKCKV |
| | SNKALPAPIEKTISKAKGQPREPQVYTLPPSRDELTKNQVSLTCLVKGF |
| | YPSDIAVWWESYGTEWSNYKTTPPVLDSDGSFFLYSKLTVTKEEWQQ |
| | GFVFSCSVMHEALHNHYTQKSLSLSPGK (SEQ ID NO: 2144) |
| Clone CH3C.35.21.17 | APELLGGPSVFLFPPKPKDTLMISRTPEVTCVVVDVSHEDPEVKFNWY |
| | VDGVEVHNAKTKPREEQYNSTYRVVSVLTVLHQDWLNGKEYKCKV |
| | SNKALPAPIEKTISKAKGQPREPQVYTLPPSRDELTKNQVSLTCLVKGF |
| | YPSDIAVLWESYGTEWSSYKTTPPVLDSDGSFFLYSKLTVTKEEWQQ |
| | GFVFSCSVMHEALHNHYTQKSLSLSPGK (SEQ ID NO: 2145) |
| Clone CH3C.35.20.1 | APELLGGPSVFLFPPKPKDTLMISRTPEVTCVVVDVSHEDPEVKFNWY |
| | VDGVEVHNAKTKPREEQYNSTYRVVSVLTVLHQDWLNGKEYKCKV |
| | SNKALPAPIEKTISKAKGQPREPQVYTLPPSRDELTKNQVSLTCLVKGF |
| | YPSDIAVEWESFGTEWSSYKTTPPVLDSDGSFFLYSKLTVTKEEWQQG |
| | FVFSCSVMHEALHNHYTQKSLSLSPGK (SEQ ID NO: 2146) |
| Clone CH3C.35.20.2 | APELLGGPSVFLFPPKPKDTLMISRTPEVTCVVVDVSHEDPEVKFNWY |
| | VDGVEVHNAKTKPREEQYNSTYRVVSVLTVLHQDWLNGKEYKCKV |
| | SNKALPAPIEKTISKAKGQPREPQVYTLPPSRDELTKNQVSLTCLVKGF |
| | YPSDIAVEWESYGTEWASYKTTPPVLDSDGSFFLYSKLTVTKEEWQQ |
| | GFVFSCSVMHEALHNHYTQKSLSLSPGK (SEQ ID NO: 2147) |
| Clone CH3C.35.20.3 | APELLGGPSVFLFPPKPKDTLMISRTPEVTCVVVDVSHEDPEVKFNWY |
| | VDGVEVHNAKTKPREEQYNSTYRVVSVLTVLHQDWLNGKEYKCKV |
| | SNKALPAPIEKTISKAKGQPREPQVYTLPPSRDELTKNQVSLTCLVKGF |
| | YPSDIAVEWESYGTEWVSYKTTPPVLDSDGSFFLYSKLTVTKEEWQQ |
| | GFVFSCSVMHEALHNHYTQKSLSLSPGK (SEQ ID NO: 2148) |
| Clone CH3C.35.20.4 | APELLGGPSVFLFPPKPKDTLMISRTPEVTCVVVDVSHEDPEVKFNWY |
| | VDGVEVHNAKTKPREEQYNSTYRVVSVLTVLHQDWLNGKEYKCKV |
| | SNKALPAPIEKTISKAKGQPREPQVYTLPPSRDELTKNQVSLTCLVKGF |
| | YPSDIAVEWESYGTEWSSYKTTPPVLDSDGSFFLYSKLTVSKEEWQQG |
| | FVFSCSVMHEALHNHYTQKSLSLSPGK (SEQ ID NO: 2149) |
| Clone CH3C.35.20.5 | APELLGGPSVFLFPPKPKDTLMISRTPEVTCVVVDVSHEDPEVKFNWY |
| | VDGVEVHNAKTKPREEQYNSTYRVVSVLTVLHQDWLNGKEYKCKV |
| | SNKALPAPIEKTISKAKGQPREPQVYTLPPSRDELTKNQVSLTCLVKGF |
| | YPSDIAVEWESFGTEWASYKTTPPVLDSDGSFFLYSKLTVTKEEWQQ |
| | GFVFSCSVMHEALHNHYTQKSLSLSPGK (SEQ ID NO: 2150) |
| Clone CH3C.35.20.6 | APELLGGPSVFLFPPKPKDTLMISRTPEVTCVVVDVSHEDPEVKFNWY |
| | VDGVEVHNAKTKPREEQYNSTYRVVSVLTVLHQDWLNGKEYKCKV |
| | SNKALPAPIEKTISKAKGQPREPQVYTLPPSRDELTKNQVSLTCLVKGF |
| | YPSDIAVEWESFGTEWVSYKTTPPVLDSDGSFFLYSKLTVTKEEWQQ |
| | GFVFSCSVMHEALHNHYTQKSLSLSPGK (SEQ ID NO: 2151) |
| Clone CH3C.35.21.a.1 | APELLGGPSVFLFPPKPKDTLMISRTPEVTCVVVDVSHEDPEVKFNWY |
| | VDGVEVHNAKTKPREEQYNSTYRVVSVLTVLHQDWLNGKEYKCKV |
| | SNKALPAPIEKTISKAKGQPREPQVYTLPPSRDELTKNQVSLTCLVKGF |
| | YPSDIAVWWESFGTEWSSYKTTPPVLDSDGSFFLYSKLTVTKEEWQQ |
| | GFVFSCSVMHEALHNHYTQKSLSLSPGK (SEQ ID NO: 2152) |
| Clone | APELLGGPSVFLFPPKPKDTLMISRTPEVTCVVVDVSHEDPEVKFNWY |
| CH3C.35.21.a.2 | VDGVEVHNAKTKPREEQYNSTYRVVSVLTVLHQDWLNGKEYKCKV |
| | SNKALPAPIEKTISKAKGQPREPQVYTLPPSRDELTKNQVSLTCLVKGF |
| | YPSDIAVWWESYGTEWASYKTTPPVLDSDGSFFLYSKLTVTKEEWQQ |
| | GFVFSCSVMHEALHNHYTQKSLSLSPGK (SEQ ID NO: 2153) |
| Clone | APELLGGPSVFLFPPKPKDTLMISRTPEVTCVVVDVSHEDPEVKFNWY |
| CH3C.35.21.a.3 | VDGVEVHNAKTKPREEQYNSTYRVVSVLTVLHQDWLNGKEYKCKV |
| | SNKALPAPIEKTISKAKGQPREPQVYTLPPSRDELTKNQVSLTCLVKGF |
| | YPSDIAVWWESYGTEWVSYKTTPPVLDSDGSFFLYSKLTVTKEEWQQ |
| | GFVFSCSVMHEALHNHYTQKSLSLSPGK (SEQ ID NO: 2154) |
| Clone | APELLGGPSVFLFPPKPKDTLMISRTPEVTCVVVDVSHEDPEVKFNWY |
| CH3C.35.21.a.4 | VDGVEVHNAKTKPREEQYNSTYRVVSVLTVLHQDWLNGKEYKCKV |
| | SNKALPAPIEKTISKAKGQPREPQVYTLPPSRDELTKNQVSLTCLVKGF |
| | YPSDIAVWWESYGTEWSSYKTTPPVLDSDGSFFLYSKLTVSKEEWQQ |
| | GFVFSCSVMHEALHNHYTQKSLSLSPGK (SEQ ID NO: 2155) |
| Clone | APELLGGPSVFLFPPKPKDTLMISRTPEVTCVVVDVSHEDPEVKFNWY |
| CH3C.35.21.a.5 | VDGVEVHNAKTKPREEQYNSTYRVVSVLTVLHQDWLNGKEYKCKV |
| | SNKALPAPIEKTISKAKGQPREPQVYTLPPSRDELTKNQVSLTCLVKGF |
| | YPSDIAVWWESFGTEWASYKTTPPVLDSDGSFFLYSKLTVTKEEWQQ |
| | GFVFSCSVMHEALHNHYTQKSLSLSPGK (SEQ ID NO: 2156) |
| Clone | APELLGGPSVFLFPPKPKDTLMISRTPEVTCVVVDVSHEDPEVKFNWY |
| CH3C.35.21.a.6 | VDGVEVHNAKTKPREEQYNSTYRVVSVLTVLHQDWLNGKEYKCKV |
| | SNKALPAPIEKTISKAKGQPREPQVYTLPPSRDELTKNQVSLTCLVKGF |
| | YPSDIAVWWESFGTEWVSYKTTPPVLDSDGSFFLYSKLTVTKEEWQQ |
| | GFVFSCSVMHEALHNHYTQKSLSLSPGK (SEQ ID NO: 2157) |
| Clone CH3C.35.23.1 | APELLGGPSVFLFPPKPKDTLMISRTPEVTCVVVDVSHEDPEVKFNWY |
| | VDGVEVHNAKTKPREEQYNSTYRVVSVLTVLHQDWLNGKEYKCKV |
| | SNKALPAPIEKTISKAKGQPREPQVYTLPPSRDELTKNQVSLTCLVKGF |
| | YPSDIAVEWESFGTEWSNYKTTPPVLDSDGSFFLYSKLTVTKEEWQQ |
| | GFVFSCSVMHEALHNHYTQKSLSLSPGK (SEQ ID NO: 2158) |
| Clone CH3C.35.23.2 | APELLGGPSVFLFPPKPKDTLMISRTPEVTCVVVDVSHEDPEVKFNWY |
| | VDGVEVHNAKTKPREEQYNSTYRVVSVLTVLHQDWLNGKEYKCKV |
| | SNKALPAPIEKTISKAKGQPREPQVYTLPPSRDELTKNQVSLTCLVKGF |
| | YPSDIAVEWESYGTEWANYKTTPPVLDSDGSFFLYSKLTVTKEEWQQ |
| | GFVFSCSVMHEALHNHYTQKSLSLSPGK (SEQ ID NO: 2159) |
| Clone CH3C.35.23.3 | APELLGGPSVFLFPPKPKDTLMISRTPEVTCVVVDVSHEDPEVKFNWY |
| | VDGVEVHNAKTKPREEQYNSTYRVVSVLTVLHQDWLNGKEYKCKV |
| | SNKALPAPIEKTISKAKGQPREPQVYTLPPSRDELTKNQVSLTCLVKGF |
| | YPSDIAVEWESYGTEWVNYKTTPPVLDSDGSFFLYSKLTVTKEEWQQ |
| | GFVFSCSVMHEALHNHYTQKSLSLSPGK (SEQ ID NO: 2160) |
| Clone CH3C.35.23.4 | APELLGGPSVFLFPPKPKDTLMISRTPEVTCVVVDVSHEDPEVKFNWY |
| | VDGVEVHNAKTKPREEQYNSTYRVVSVLTVLHQDWLNGKEYKCKV |
| | SNKALPAPIEKTISKAKGQPREPQVYTLPPSRDELTKNQVSLTCLVKGF |
| | YPSDIAVEWESYGTEWSNYKTTPPVLDSDGSFFLYSKLTVSKEEWQQ |
| | GFVFSCSVMHEALHNHYTQKSLSLSPGK (SEQ ID NO: 2161) |
| Clone CH3C.35.23.5 | APELLGGPSVFLFPPKPKDTLMISRTPEVTCVVVDVSHEDPEVKFNWY |
| | VDGVEVHNAKTKPREEQYNSTYRVVSVLTVLHQDWLNGKEYKCKV |
| | SNKALPAPIEKTISKAKGQPREPQVYTLPPSRDELTKNQVSLTCLVKGF |
| | YPSDIAVEWESFGTEWANYKTTPPVLDSDGSFFLYSKLTVTKEEWQQ |
| | GFVFSCSVMHEALHNHYTQKSLSLSPGK (SEQ ID NO: 2162) |
| Clone CH3C.35.23.6 | APELLGGPSVFLFPPKPKDTLMISRTPEVTCVVVDVSHEDPEVKFNWY |
| | VDGVEVHNAKTKPREEQYNSTYRVVSVLTVLHQDWLNGKEYKCKV |
| | SNKALPAPIEKTISKAKGQPREPQVYTLPPSRDELTKNQVSLTCLVKGF |
| | YPSDIAVEWESFGTEWVNYKTTPPVLDSDGSFFLYSKLTVTKEEWQQ |
| | GFVFSCSVMHEALHNHYTQKSLSLSPGK (SEQ ID NO: 2163) |
| Clone CH3C.35.24.1 | APELLGGPSVFLFPPKPKDTLMISRTPEVTCVVVDVSHEDPEVKFNWY |
| | VDGVEVHNAKTKPREEQYNSTYRVVSVLTVLHQDWLNGKEYKCKV |
| | SNKALPAPIEKTISKAKGQPREPQVYTLPPSRDELTKNQVSLTCLVKGF |
| | YPSDIAVWWESFGTEWSNYKTTPPVLDSDGSFFLYSKLTVTKEEWQQ |
| | GFVFSCSVMHEALHNHYTQKSLSLSPGK (SEQ ID NO: 2164) |
| Clone CH3C.35.24.2 | APELLGGPSVFLFPPKPKDTLMISRTPEVTCVVVDVSHEDPEVKFNWY |
| | VDGVEVHNAKTKPREEQYNSTYRVVSVLTVLHQDWLNGKEYKCKV |
| | SNKALPAPIEKTISKAKGQPREPQVYTLPPSRDELTKNQVSLTCLVKGF |
| | YPSDIAVWWESYGTEWANYKTTPPVLDSDGSFFLYSKLTVTKEEWQQ |
| | GFVFSCSVMHEALHNHYTQKSLSLSPGK (SEQ ID NO: 2165) |
| Clone CH3C.35.24.3 | APELLGGPSVFLFPPKPKDTLMISRTPEVTCVVVDVSHEDPEVKFNWY |
| | VDGVEVHNAKTKPREEQYNSTYRVVSVLTVLHQDWLNGKEYKCKV |
| | SNKALPAPIEKTISKAKGQPREPQVYTLPPSRDELTKNQVSLTCLVKGF |
| | YPSDIAVWWESYGTEWVNYKTTPPVLDSDGSFFLYSKLTVTKEEWQQ |
| | GFVFSCSVMHEALHNHYTQKSLSLSPGK (SEQ ID NO: 2166) |
| Clone CH3C.35.24.4 | APELLGGPSVFLFPPKPKDTLMISRTPEVTCVVVDVSHEDPEVKFNWY |
| | VDGVEVHNAKTKPREEQYNSTYRVVSVLTVLHQDWLNGKEYKCKV |
| | SNKALPAPIEKTISKAKGQPREPQVYTLPPSRDELTKNQVSLTCLVKGF |
| | YPSDIAVWWESYGTEWSNYKTTPPVLDSDGSFFLYSKLTVSKEEWQQ |
| | GFVFSCSVMHEALHNHYTQKSLSLSPGK (SEQ ID NO: 2167) |
| Clone CH3C.35.24.5 | APELLGGPSVFLFPPKPKDTLMISRTPEVTCVVVDVSHEDPEVKFNWY |
| | VDGVEVHNAKTKPREEQYNSTYRVVSVLTVLHQDWLNGKEYKCKV |
| | SNKALPAPIEKTISKAKGQPREPQVYTLPPSRDELTKNQVSLTCLVKGF |
| | YPSDIAVWWESFGTEWANYKTTPPVLDSDGSFFLYSKLTVTKEEWQQ |
| | GFVFSCSVMHEALHNHYTQKSLSLSPGK (SEQ ID NO: 2168) |
| Clone CH3C.35.24.6 | APELLGGPSVFLFPPKPKDTLMISRTPEVTCVVVDVSHEDPEVKFNWY |
| | VDGVEVHNAKTKPREEQYNSTYRVVSVLTVLHQDWLNGKEYKCKV |
| | SNKALPAPIEKTISKAKGQPREPQVYTLPPSRDELTKNQVSLTCLVKGF |
| | YPSDIAVWWESFGTEWVNYKTTPPVLDSDGSFFLSKLTVTKEEWQQ |
| | GFVFSCSVMHEALHNHYTQKSLSLSPGK (SEQ ID NO: 2169) |
| Clone CH3C.35.21.17.1 | APELLGGPSVFLFPPKPKDTLMISRTPEVTCVVVDVSHEDPEVKFNWY |
| | VDGVEVHNAKTKPREEQYNSTYRVVSVLTVLHQDWLNGKEYKCKV |
| | SNKALPAPIEKTISKAKGQPREPQVYTLPPSRDELTKNQVSLTCLVKGF |
| | YPSDIAVLWESFGTEWSSYKTTPPVLDSDGSFFLYSKLTVTKEEWQQG |
| | FVFSCSVMHEALHNHYTQKSLSLSPGK (SEQ ID NO: 2170) |
| Clone CH3C.35.21.17.2 | APELLGGPSVFLFPPKPKDTLMISRTPEVTCVVVDVSHEDPEVKFNWY |
| | VDGVEVHNAKTKPREEQYNSTYRVVSVLTVLHQDWLNGKEYKCKV |
| | SNKALPAPIEKTISKAKGQPREPQVYTLPPSRDELTKNQVSLTCLVKGF |
| | YPSDIAVLWESYGTEWASYKTTPPVLDSDGSFFLYSKLTVTKEEWQQ |
| | GFVFSCSVMHEALHNHYTQKSLSLSPGK (SEQ ID NO: 2171) |
| Clone CH3C.35.21.17.3 | APELLGGPSVFLFPPKPKDTLMISRTPEVTCVVVDVSHEDPEVKFNWY |
| | VDGVEVHNAKTKPREEQYNSTYRVVSVLTVLHQDWLNGKEYKCKV |
| | SNKALPAPIEKTISKAKGQPREPQVYTLPPSRDELTKNQVSLTCLVKGF |
| | YPSDIAVLWESYGTEWVSYKTTPPVLDSDGSFFLYSKLTVTKEEWQQ |
| | GFVFSCSVMHEALHNHYTQKSLSLSPGK (SEQ ID NO: 2172) |
| Clone CH3C.35.21.17.4 | APELLGGPSVFLFPPKPKDTLMISRTPEVTCVVVDVSHEDPEVKFNWY |
| | VDGVEVHNAKTKPREEQYNSTYRVVSVLTVLHQDWLNGKEYKCKV |
| | SNKALPAPIEKTISKAKGQPREPQVYTLPPSRDELTKNQVSLTCLVKGF |
| | YPSDIAVLWESYGTEWSSYKTTPPVLDSDGSFFLYSKLTVSKEEWQQG |
| | FVFSCSVMHEALHNHYTQKSLSLSPGK (SEQ ID NO: 2173) |
| Clone CH3C.35.21.17.5 | APELLGGPSVFLFPPKPKDTLMISRTPEVTCVVVDVSHEDPEVKFNWY |
| | VDGVEVHNAKTKPREEQYNSTYRVVSVLTVLHQDWLNGKEYKCKV |
| | SNKALPAPIEKTISKAKGQPREPQVYTLPPSRDELTKNQVSLTCLVKGF |
| | YPSDIAVLWESFGTEWASYKTTPPVLDSDGSFFLYSKLTVTKEEWQQ |
| | GFVFSCSVMHEALHNHYTQKSLSLSPGK (SEQ ID NO: 2174) |
| Clone CH3C.35.21.17.6 | APELLGGPSVFLFPPKPKDTLMISRTPEVTCVVVDVSHEDPEVKFNWY |
| | VDGVEVHNAKTKPREEQYNSTYRVVSVLTVLHQDWLNGKEYKCKV |
| | SNKALPAPIEKTISKAKGQPREPQVYTLPPSRDELTKNQVSLTCLVKGF |
| | YPSDIAVLWESFGTEWVSYKTTPPVLDSDGSFFLYSKLTVTKEEWQQ |
| | GFVFSCSVMHEALHNHYTQKSLSLSPGK (SEQ ID NO: 2175) |
| Clones | APELLGGPSVFLFPPKPKDTLMISRTPEVTCVVVDVSHEDPEVKFNWY |
| CH3C.35.N390 and | VDGVEVHNAKTKPREEQYNSTYRVVSVLTVLHQDWLNGKEYKCKV |
| CH3C.35.N163 | SNKALPAPIEKTISKAKGQPREPQVYTLPPSRDELTKNQVSLTCLVKGF |
| | YPSDIAVEWESYGTEWSNYKTTPPVLDSDGSFFLYSKLTVTKSEWQQ |
| | GFVFSCSVMHEALHNHYTQKSLSLSPGK (SEQ ID NO: 2176) |
| Clone CH3C.1 | APELLGGPSVFLFPPKPKDTLMISRTPEVTCVVVDVSHEDPEVKFNWY |
| | VDGVEVHNAKTKPREEQYNSTYRVVSVLTVLHQDWLNGKEYKCKV |
| | SNKALPAPIEKTISKAKGQPREPQVYTLPPSRDELTKNQVSLTCLVKGF |
| | YPSDIAVEWESLGLVWVGYKTTPPVLDSDGSFFLYSKLTVAKSTWQQ |
| | GWVFSCSVMHEALHNHYTQKSLSLSPGK (SEQ ID NO: 2177) |
| Clone CH3C.2 | APELLGGPSVFLFPPKPKDTLMISRTPEVTCVVVDVSHEDPEVKFNWY |
| | VDGVEVHNAKTKPREEQYNSTYRVVSVLTVLHQDWLNGKEYKCKV |
| | SNKALPAPIEKTISKAKGQPREPQVYTLPPSRDELTKNQVSLTCLVKGF |
| | YPSDIAVEWESYGTVWSHYKTTPPVLDSDGSFFLYSKLTVSKSEWQQ |
| | GYVFSCSVMHEALHNHYTQKSLSLSPGK (SEQ ID NO: 2178) |
| Clone CH3C.3 | APELLGGPSVFLFPPKPKDTLMISRTPEVTCVVVDVSHEDPEVKFNWY |
| | VDGVEVHNAKTKPREEQYNSTYRVVSVLTVLHQDWLNGKEYKCKV |
| | SNKALPAPIEKTISKAKGQPREPQVYTLPPSRDELTKNQVSLTCLVKGF |
| | YPSDIAVEWESYGTEWSQYKTTPPVLDSDGSFFLYSKLTVEKSDWQQ |
| | GHVFSCSVMHEALHNHYTQKSLSLSPGK (SEQ ID NO: 2179) |
| Clone CH3C.4 | APELLGGPSVFLFPPKPKDTLMISRTPEVTCVVVDVSHEDPEVKFNWY |
| | VDGVEVHNAKTKPREEQYNSTYRVVSVLTVLHQDWLNGKEYKCKV |
| | SNKALPAPIEKTISKAKGQPREPQVYTLPPSRDELTKNQVSLTCLVKGF |
| | YPSDIAVEWESVGTPWALYKTTPPVLDSDGSFFLYSKLTVLKSEWQQ |
| | GWVFSCSVMHEALHNHYTQKSLSLSPGK (SEQ ID NO: 2180) |
| Clone CH3C.17 | APELLGGPSVFLFPPKPKDTLMISRTPEVTCVVVDVSHEDPEVKFNWY |
| | VDGVEVHNAKTKPREEQYNSTYRVVSVLTVLHQDWLNGKEYKCKV |
| | SNKALPAPIEKTISKAKGQPREPQVYTLPPSRDELTKNQVSLTCLVKGF |
| | YPSDIAVEWESYGTVWSKYKTTPPVLDSDGSFFLYSKLTVSKSEWQQ |
| | GFVFSCSVMHEALHNHYTQKSLSLSPGK (SEQ ID NO: 2181) |
| Clone CH3C.18 | APELLGGPSVFLFPPKPKDTLMISRTPEVTCVVVDVSHEDPEVKFNWY |
| | VDGVEVHNAKTKPREEQYNSTYRVVSVLTVLHQDWLNGKEYKCKV |
| | SNKALPAPIEKTISKAKGQPREPQVYTLPPSRDELTKNQVSLTCLVKGF |
| | YPSDIAVEWESLGHVWAVYKTTPPVLDSDGSFFLYSKLTVPKSTWQQ |
| | GWVFSCSVMHEALHNHYTQKSLSLSPGK (SEQ ID NO: 2182) |
| Clone CH3C.21 | APELLGGPSVFLFPPKPKDTLMISRTPEVTCVVVDVSHEDPEVKFNWY |
| | VDGVEVHNAKTKPREEQYNSTYRVVSVLTVLHQDWLNGKEYKCKV |
| | SNKALPAPIEKTISKAKGQPREPQVYTLPPSRDELTKNQVSLTCLVKGF |
| | YPSDIAVEWESLGLVWVGYKTTPPVLDSDGSFFLYSKLTVPKSTWQQ |
| | GWVFSCSVMHEALHNHYTQKSLSLSPGK (SEQ ID NO: 2183) |
| Clone CH3C.25 | APELLGGPSVFLFPPKPKDTLMISRTPEVTCVVVDVSHEDPEVKFNWY |
| | VDGVEVHNAKTKPREEQYNSTYRVVSVLTVLHQDWLNGKEYKCKV |
| | SNKALPAPIEKTISKAKGQPREPQVYTLPPSRDELTKNQVSLTCLVKGF |
| | YPSDIAVEWESMGHVWVGYKTTPPVLDSDGSFFLYSKLTVDKSTWQ |
| | QGWVFSCSVMHEALHNHYTQKSLSLSPGK (SEQ ID NO: 2184) |
| Clone CH3C.34 | APELLGGPSVFLFPPKPKDTLMISRTPEVTCVVVDVSHEDPEVKFNWY |
| | VDGVEVHNAKTKPREEQYNSTYRVVSVLTVLHQDWLNGKEYKCKV |
| | SNKALPAPIEKTISKAKGQPREPQVYTLPPSRDELTKNQVSLTCLVKGF |
| | YPSDIAVEWESLGLVWVFSKTTPPVLDSDGSFFLYSKLTVPKSTWQQG |
| | WVFSCSVMHEALHNHYTQKSLSLSPGK (SEQ ID NO: 2185) |
| Clone CH3C.35 | APELLGGPSVFLFPPKPKDTLMISRTPEVTCVVVDVSHEDPEVKFNWY |
| | VDGVEVHNAKTKPREEQYNSTYRVVSVLTVLHQDWLNGKEYKCKV |
| | SNKALPAPIEKTISKAKGQPREPQVYTLPPSRDELTKNQVSLTCLVKGF |
| | YPSDIAVEWESYGTEWSSYKTTPPVLDSDGSFFLYSKLTVTKSEWQQG |
| | FVFSCSVMHEALHNHYTQKSLSLSPGK (SEQ ID NO: 2186) |
| Clone CH3C.44 | APELLGGPSVFLFPPKPKDTLMISRTPEVTCVVVDVSHEDPEVKFNWY |
| | VDGVEVHNAKTKPREEQYNSTYRVVSVLTVLHQDWLNGKEYKCKV |
| | SNKALPAPIEKTISKAKGQPREPQVYTLPPSRDELTKNQVSLTCLVKGF |
| | YPSDIAVEWESYGTEWSNYKTTPPVLDSDGSFFLYSKLTVSKSEWQQ |
| | GFVFSCSVMHEALHNHYTQKSLSLSPGK (SEQ ID NO: 2187) |
| Clone CH3C.51 | APELLGGPSVFLFPPKPKDTLMISRTPEVTCVVVDVSHEDPEVKFNWY |
| | VDGVEVHNAKTKPREEQYNSTYRVVSVLTVLHQDWLNGKEYKCKV |
| | SNKALPAPIEKTISKAKGQPREPQVYTLPPSRDELTKNQVSLTCLVKGF |
| | YPSDIAVEWESLGHVWVGYKTTPPVLDSDGSFFLYSKLTVSKSEWQQ |
| | GWVFSCSVMHEALHNHYTQKSLSLSPGK (SEQ ID NO: 2188) |
| Clone CH3C.3.1-3 | APELLGGPSVFLFPPKPKDTLMISRTPEVTCVVVDVSHEDPEVKFNWY |
| | VDGVEVHNAKTKPREEQYNSTYRVVSVLTVLHQDWLNGKEYKCKV |
| | SNKALPAPIEKTISKAKGQPREPQVYTLPPSRDELTKNQVSLTCLVKGF |
| | YPSDIAVEWESLGHVWVATKTTPPVLDSDGSFFLYSKLTVPKSTWQQ |
| | GWVFSCSVMHEALHNHYTQKSLSLSPGK (SEQ ID NO: 2189) |
| Clone CH3C.3.1-9 | APELLGGPSVFLFPPKPKDTLMISRTPEVTCVVVDVSHEDPEVKFNWY |
| | VDGVEVHNAKTKPREEQYNSTYRVVSVLTVLHQDWLNGKEYKCKV |
| | SNKALPAPIEKTISKAKGQPREPQVYTLPPSRDELTKNQVSLTCLVKGF |
| | YPSDIAVEWESLGPVWVHTKTTPPVLDSDGSFFLYSKLTVPKSTWQQ |
| | GWVFSCSVMHEALHNHYTQKSLSLSPGK (SEQ ID NO: 2190) |
| Clone CH3C.3.2-5 | APELLGGPSVFLFPPKPKDTLMISRTPEVTCVVVDVSHEDPEVKFNWY |
| | VDGVEVHNAKTKPREEQYNSTYRVVSVLTVLHQDWLNGKEYKCKV |
| | SNKALPAPIEKTISKAKGQPREPQVYTLPPSRDELTKNQVSLTCLVKGF |
| | YPSDIAVEWESLGHVWVDQKTTPPVLDSDGSFFLYSKLTVPKSTWQQ |
| | GWVFSCSVMHEALHNHYTQKSLSLSPGK (SEQ ID NO: 2191) |
| Clone CH3C.3.2-19 | APELLGGPSVFLFPPKPKDTLMISRTPEVTCVVVDVSHEDPEVKFNWY |
| | VDGVEVHNAKTKPREEQYNSTYRVVSVLTVLHQDWLNGKEYKCKV |
| | SNKALPAPIEKTISKAKGQPREPQVYTLPPSRDELTKNQVSLTCLVKGF |
| | YPSDIAVEWESLGHVWVNQKTTPPVLDSDGSFFLYSKLTVPKSTWQQ |
| | GWVFSCSVMHEALHNHYTQKSLSLSPGK (SEQ ID NO: 2192) |
| Clone CH3C.3.2-1 | APELLGGPSVFLFPPKPKDTLMISRTPEVTCVVVDVSHEDPEVKFNWY |
| | VDGVEVHNAKTKPREEQYNSTYRVVSVLTVLHQDWLNGKEYKCKV |
| | SNKALPAPIEKTISKAKGQPREPQVYTLPPSRDELTKNQVSLTCLVKGF |
| | YPSDIAVEWESLGHVWVNFKTTPPVLDSDGSFFLYSKLTVPKSTWQQ |
| | GWVFSCSVMHEALHNHYTQKSLSLSPGK (SEQ ID NO: 2193) |
| Clone CH3C.18 | APELLGGPSVFLFPPKPKDTLMISRTPEVTCVVVDVSHEDPEVKFNWY |
| variant | VDGVEVHNAKTKPREEQYNSTYRVVSVLTVLHQDWLNGKEYKCKV |
| | SNKALPAPIEKTISKAKGQPREPQVYTLPPSRDELTKNQVSLTCLVKGF |
| | YPSDIAVWWESLGHVWAVYKTTPPVLDSDGSFFLYSKLTVPKSTWQQ |
| | GWVFSCSVMHEALHNHYTQKSLSLSPGK (SEQ ID NO: 2194) |
| Clone CH3C.18 | APELLGGPSVFLFPPKPKDTLMISRTPEVTCVVVDVSHEDPEVKFNWY |
| variant | VDGVEVHNAKTKPREEQYNSTYRVVSVLTVLHQDWLNGKEYKCKV |
| | SNKALPAPIEKTISKAKGQPREPQVYTLPPSRDELTKNQVSLTCLVKGF |
| | YPSDIAVLWESLGHVWAVYKTTPPVLDSDGSFFLYSKLTVPKSTWQQ |
| | GWVFSCSVMHEALHNHYTQKSLSLSPGK (SEQ ID NO: 2195) |
| Clone CH3C.18 | APELLGGPSVFLFPPKPKDTLMISRTPEVTCVVVDVSHEDPEVKFNWY |
| variant | VDGVEVHNAKTKPREEQYNSTYRVVSVLTVLHQDWLNGKEYKCKV |
| | SNKALPAPIEKTISKAKGQPREPQVYTLPPSRDELTKNQVSLTCLVKGF |
| | YPSDIAVYWESLGHVWAVYKTTPPVLDSDGSFFLYSKLTVPKSTWQQ |
| | GWVFSCSVMHEALHNHYTQKSLSLSPGK (SEQ ID NO: 2196) |
| Clone CH3C.18 | APELLGGPSVFLFPPKPKDTLMISRTPEVTCVVVDVSHEDPEVKFNWY |
| variant | VDGVEVHNAKTKPREEQYNSTYRVVSVLTVLHQDWLNGKEYKCKV |
| | SNKALPAPIEKTISKAKGQPREPQVYTLPPSRDELTKNQVSLTCLVKGF |
| | YPSDIAVEWESLGHVWAVYQTTPPVLDSDGSFFLYSKLTVPKSTWQQ |
| | GWVFSCSVMHEALHNHYTQKSLSLSPGK (SEQ ID NO: 2197) |
| Clone CH3C.18 | APELLGGPSVFLFPPKPKDTLMISRTPEVTCVVVDVSHEDPEVKFNWY |
| variant | VDGVEVHNAKTKPREEQYNSTYRVVSVLTVLHQDWLNGKEYKCKV |
| | SNKALPAPIEKTISKAKGQPREPQVYTLPPSRDELTKNQVSLTCLVKGF |
| | YPSDIAVEWESLGHVWAVYFTTPPVLDSDGSFFLYSKLTVPKSTWQQ |
| | GWVFSCSVMHEALHNHYTQKSLSLSPGK (SEQ ID NO: 2198) |
| Clone CH3C.18 | APELLGGPSVFLFPPKPKDTLMISRTPEVTCVVVDVSHEDPEVKFNWY |
| variant | VDGVEVHNAKTKPREEQYNSTYRVVSVLTVLHQDWLNGKEYKCKV |
| | SNKALPAPIEKTISKAKGQPREPQVYTLPPSRDELTKNQVSLTCLVKGF |
| | YPSDIAVEWESLGHVWAVYHTTPPVLDSDGSFFLYSKLTVPKSTWQQ |
| | GWVFSCSVMHEALHNHYTQKSLSLSPGK (SEQ ID NO: 2199) |
| Clone CH3C.35.13 | APELLGGPSVFLFPPKPKDTLMISRTPEVTCVVVDVSHEDPEVKFNWY |
| | VDGVEVHNAKTKPREEQYNSTYRVVSVLTVLHQDWLNGKEYKCKV |
| | SNKALPAPIEKTISKAKGQPREPQVYTLPPSRDELTKNQVSLTCLVKGF |
| | YPSDIAVWWESLGHVWAVYKTTPPVLDSDGSFFLYSKLTVPKSTWQQ |
| | GWVFSCSVMHEALHNHYTQKSLSLSPGK (SEQ ID NO: 2200) |
| Clone CH3C.35.14 | APELLGGPSVFLFPPKPKDTLMISRTPEVTCVVVDVSHEDPEVKFNWY |
| | VDGVEVHNAKTKPREEQYNSTYRVVSVLTVLHQDWLNGKEYKCKV |
| | SNKALPAPIEKTISKAKGQPREPQVYTLPPSRDELTKNQVSLTCLVKGF |
| | YPSDIAVEWESLGHVWAVYQTTPPVLDSDGSFFLYSKLTVPKSTWQQ |
| | GWVFSCSVMHEALHNHYTQKSLSLSPGK (SEQ ID NO: 2201) |
| Clone CH3C.35.15 | APELLGGPSVFLFPPKPKDTLMISRTPEVTCVVVDVSHEDPEVKFNWY |
| | VDGVEVHNAKTKPREEQYNSTYRVVSVLTVLHQDWLNGKEYKCKV |
| | SNKALPAPIEKTISKAKGQPREPQVYTLPPSRDELTKNQVSLTCLVKGF |
| | YPSDIAVWWESLGHVWAVYQTTPPVLDSDGSFFLYSKLTVPKSTWQQ |
| | GWVFSCSVMHEALHNHYTQKSLSLSPGK (SEQ ID NO: 2202) |
| Clone CH3C.35.16 | APELLGGPsVFLFPPKPKDTLMISRTPEVTCVVVDVSHEDPEVKFNWY |
| | VDGVEVHNAKTKPREEQYNSTYRVVSVLTVLHQDWLNGKEYKCKV |
| | SNKALPAPIEKTISKAKGQPREPQVYTLPPSRDELTKNQVSLTCLVKGF |
| | YPSDIAVWWESLGHVWVNQKTTPPVLDSDGSFFLYSKLTVPKSTWQQ |
| | GWVFSCSVMHEALHNHYTQKSLSLSPGK (SEQ ID NO: 2203) |
| Clone CH3C.35.17 | APELLGGPSVFLFPPKPKDTLMISRTPEVTCVVVDVSHEDPEVKFNWY |
| | VDGVEVHNAKTKPREEQYNSTYRVVSVLTVLHQDWLNGKEYKCKV |
| | SNKALPAPIEKTISKAKGQPREPQVYTLPPSRDELTKNQVSLTCLVKGF |
| | YPSDIAVEWESLGHVWVNQQTTPPVLDSDGSFFLYSKLTVPKSTWQQ |
| | GWVFSCSVMHEALHNHYTQKSLSLSPGK (SEQ ID NO: 2204) |
| Clone CH3C.35.18 | APELLGGPSVFLFPPKPKDTLMISRTPEVTCVVVDVSHEDPEVKFNWY |
| | VDGVEVHNAKTKPREEQYNSTYRVVSVLTVLHQDWLNGKEYKCKV |
| | SNKALPAPIEKTISKAKGQPREPQVYTLPPSRDELTKNQVSLTCLVKGF |
| | YPSDIAVWWESLGHVWVNQQTTPPVLDSDGSFFLYSKLTVPKSTWQQ |
| | GWVFSCSVMHEALHNHYTQKSLSLSPGK (SEQ ID NO: 2205) |
| Clone CH3C.35.19 | APELLGGPSVFLFPPKPKDTLMISRTPEVTCVVVDVSHEDPEVKFNWY |
| | VDGVEVHNAKTKPREEQYNSTYRVVSVLTVLHQDWLNGKEYKCKV |
| | SNKALPAPIEKTISKAKGQPREPQVYTLPPSRDELTKNQVSLTCLVKGF |
| | YPSDIAVWWESYGTEWSSYKTTPPVLDSDGSFFLYSKLTVTKSEWQQ |
| | GFVFSCSVMHEALHNHYTQKSLSLSPGK (SEQ ID NO: 2206) |
| Clone | APELLGGPSVFLFPPKPKDTLMISRTPEVTCVVVDVSHEDPEVKFNWY |
| CH3C.35.K165Q | VDGVEVHNAKTKPREEQYNSTYRVVSVLTVLHQDWLNGKEYKCKV |
| | SNKALPAPIEKTISKAKGQPREPQVYTLPPSRDELTKNQVSLTCLVKGF |
| | YPSDIAVEWESYGTEWSSYQTTPPVLDSDGSFFLYSKLTVTKSEWQQG |
| | FVFSCSVMHEALHNHYTQKSLSLSPGK (SEQ ID NO: 2207) |
| Clone | APELLGGPSVFLFPPKPKDTLMISRTPEVTCVVVDVSHEDPEVKFNWY |
| CH3C.35.N163.K165Q | VDGVEVHNAKTKPREEQYNSTYRVVSVLTVLHQDWLNGKEYKCKV |
| | SNKALPAPIEKTISKAKGQPREPQVYTLPPSRDELTKNQVSLTCLVKGF |
| | YPSDIAVEWESYGTEWSNYQTTPPVLDSDGSFFLYSKLTVTKSEWQQ |
| | GFVFSCSVMHEALHNHYTQKSLSLSPGK (SEQ ID NO: 2208) |
| Clone CH3C.35.21.1 | APELLGGPSVFLFPPKPKDTLMISRTPEVTCVVVDVSHEDPEVKFNWY |
| | VDGVEVHNAKTKPREEQYNSTYRVVSVLTVLHQDWLNGKEYKCKV |
| | SNKALPAPIEKTISKAKGQPREPQVYTLPPSRDELTKNQVSLTCLVKGF |
| | YPSDIAVLWESYGTEWSSYKTTPPVLDSDGSFFLYSKLTVTKSEWQQG |
| | FVFSCSVMHEALHNHYTQKSLSLSPGK (SEQ ID NO: 2209) |
| Clone CH3C.35.21.2 | APELLGGPSVFLFPPKPKDTLMISRTPEVTCVVVDVSHEDPEVKFNWY |
| | VDGVEVHNAKTKPREEQYNSTYRVVSVLTVLHQDWLNGKEYKCKV |
| | SNKALPAPIEKTISKAKGQPREPQVYTLPPSRDELTKNQVSLTCLVKGF |
| | YPSDIAVLWESYGTEWSSYRTTPPVLDSDGSFFLYSKLTVTKSEWQQG |
| | FVFSCSVMHEALHNHYTQKSLSLSPGK (SEQ ID NO: 2210) |
| Clone CH3C.35.21.3 | APELLGGPSVFLFPPKPKDTLMISRTPEVTCVVVDVSHEDPEVKFNWY |
| | VDGVEVHNAKTKPREEQYNSTYRVVSVLTVLHQDWLNGKEYKCKV |
| | SNKALPAPIEKTISKAKGQPREPQVYTLPPSRDELTKNQVSLTCLVKGF |
| | YPSDIAVLWESYGTEWSSYRTTPPVLDSDGSFFLYSKLTVTREEWQQG |
| | FVFSCSVMHEALHNHYTQKSLSLSPGK (SEQ ID NO: 2211) |
| Clone CH3C.35.21.4 | APELLGGPSVFLFPPKPKDTLMISRTPEVTCVVVDVSHEDPEVKFNWY |
| | VDGVEVHNAKTKPREEQYNSTYRVVSVLTVLHQDWLNGKEYKCKV |
| | SNKALPAPIEKTISKAKGQPREPQVYTLPPSRDELTKNQVSLTCLVKGF |
| | YPSDIAVLWESYGTEWSSYRTTPPVLDSDGSFFLYSKLTVTGEEWQQG |
| | FVFSCSVMHEALHNHYTQKSLSLSPGK (SEQ ID NO: 2212) |
| Clone CH3C.35.21.5 | APELLGGPSVFLFPPKPKDTLMISRTPEVTCVVVDVSHEDPEVKFNWY |
| | VDGVEVHNAKTKPREEQYNSTYRVVSVLTVLHQDWLNGKEYKCKV |
| | SNKALPAPIEKTISKAKGQPREPQVYTLPPSRDELTKNQVSLTCLVKGF |
| | YPSDIAVLWESYGTEWSSYRTTPPVLDSDGSFFLYSKLTVTREEWQQG |
| | FVFSCWVMHEALHNHYTQKSLSLSPGK (SEQ ID NO: 2213) |
| Clone CH3C.35.21.6 | APELLGGPSVFLFPPKPKDTLMISRTPEVTCVVVDVSHEDPEVKFNWY |
| | VDGVEVHNAKTKPREEQYNSTYRVVSVLTVLHQDWLNGKEYKCKV |
| | SNKALPAPIEKTISKAKGQPREPQVYTLPPSRDELTKNQVSLTCLVKGF |
| | YPSDIAVLWESYGTEWSSYRTTPPVLDSDGSFFLYSKLTVTKEEWQQG |
| | FVFSCWVMHEALHNHYTQKSLSLSPGK (SEQ ID NO: 2214) |
| Clone CH3C.35.21.7 | APELLGGPSVFLFPPKPKDTLMISRTPEVTCVVVDVSHEDPEVKFNWY |
| | VDGVEVHNAKTKPREEQYNSTYRVVSVLTVLHQDWLNGKEYKCKV |
| | SNKALPAPIEKTISKAKGQPREPQVYTLPPSRDELTKNQVSLTCLVKGF |
| | YPSDIAVLWESYGTEWSSYRTTPPVLDSDGSFFLYSKLTVTREEWQQG |
| | FVFTCWVMHEALHNHYTQKSLSLSPGK (SEQ ID NO: 2215) |
| Clone CH3C.35.21.8 | APELLGGPSVFLFPPKPKDTLMISRTPEVTCVVVDVSHEDPEVKFNWY |
| | VDGVEVHNAKTKPREEQYNSTYRVVSVLTVLHQDWLNGKEYKCKV |
| | SNKALPAPIEKTISKAKGQPREPQVYTLPPSRDELTKNQVSLTCLVKGF |
| | YPSDIAVLWESYGTEWSSYRTTPPVLDSDGSFFLYSKLTVTREEWQQG |
| | FVFTCGVMHEALHNHYTQKSLSLSPGK (SEQ ID NO: 2216) |
| Clone CH3C.35.21.9 | APELLGGPSVFLFPPKPKDTLMISRTPEVTCVVVDVSHEDPEVKFNWY |
| | VDGVEVHNAKTKPREEQYNSTYRVVSVLTVLHQDWLNGKEYKCKV |
| | SNKALPAPIEKTISKAKGQPREPQVYTLPPSRDELTKNQVSLTCLVKGF |
| | YPSDIAVLWESYGTEWSSYRTTPPVLDSDGSFFLYSKLTVTREEWQQG |
| | FVFECWVMHEALHNHYTQKSLSLSPGK (SEQ ID NO: 2217) |
| Clone CH3C.35.21.10 | APELLGGPSVFLFPPKPKDTLMISRTPEVTCVVVDVSHEDPEVKFNWY |
| | VDGVEVHNAKTKPREEQYNSTYRVVSVLTVLHQDWLNGKEYKCKV |
| | SNKALPAPIEKTISKAKGQPREPQVYTLPPSRDELTKNQVSLTCLVKGF |
| | YPSDIAVLWESYGTEWSSYRTTPPVLDSDGSFFLYSKLTVTREEWQQG |
| | FVFKCWVMHEALHNHYTQKSLSLSPGK (SEQ ID NO: 2218) |
| Clone CH3C.35.21.il | APELLGGPSVFLFPPKPKDTLMISRTPEVTCVVVDVSHEDPEVKFNWY |
| | VDGVEVHNAKTKPREEQYNSTYRVVSVLTVLHQDWLNGKEYKCKV |
| | SNKALPAPIEKTISKAKGQPREPQVYTLPPSRDELTKNQVSLTCLVKGF |
| | YPSDIAVLWESYGTEWSSYRTTPPVLDSDGSFFLYSKLTVTPEEWQQG |
| | FVFKCWVMHEALHNHYTQKSLSLSPGK (SEQ ID NO: 2219) |
| Clone CH3C.35.21.12 | APELLGGPSVFLFPPKPKDTLMISRTPEVTCVVVDVSHEDPEVKFNWY |
| | VDGVEVHNAKTKPREEQYNSTYRVVSVLTVLHQDWLNGKEYKCKV |
| | SNKALPAPIEKTISKAKGQPREPQVYTLPPSRDELTKNQVSLTCLVKGF |
| | YPSDIAVWWESYGTEWSSYRTTPPVLDSDGSFFLYSKLTVTREEWQQ |
| | GFVFSCSVMHEALHNHYTQKSLSLSPGK (SEQ ID NO: 2220) |
| Clone CH3C.35.21.13 | APELLGGPSVFLFPPKPKDTLMISRTPEVTCVVVDVSHEDPEVKFNWY |
| | VDGVEVHNAKTKPREEQYNSTYRVVSVLTVLHQDWLNGKEYKCKV |
| | SNKALPAPIEKTISKAKGQPREPQVYTLPPSRDELTKNQVSLTCLVKGF |
| | YPSDIAVWWESYGTEWSSYRTTPPVLDSDGSFFLYSKLTVTGEEWQQ |
| | GFVFSCSVMHEALHNHYTQKSLSLSPGK (SEQ ID NO: 2221) |
| Clone CH3C.35.21.14 | APELLGGPSVFLFPPKPKDTLMISRTPEVTCVVVDVSHEDPEVKFNWY |
| | VDGVEVHNAKTKPREEQYNSTYRVVSVLTVLHQDWLNGKEYKCKV |
| | SNKALPAPIEKTISKAKGQPREPQVYTLPPSRDELTKNQVSLTCLVKGF |
| | YPSDIAVWWESYGTEWSSYRTTPPVLDSDGSFFLYSKLTVTREEWQQ |
| | GFVFTCWVMHEALHNHYTQKSLSLSPGK (SEQ ID NO: 2222) |
| Clone CH3C.35.21.15 | APELLGGPSVFLFPPKPKDTLMISRTPEVTCVVVDVSHEDPEVKFNWY |
| | VDGVEVHNAKTKPREEQYNSTYRVVSVLTVLHQDWLNGKEYKCKV |
| | SNKALPAPIEKTISKAKGQPREPQVYTLPPSRDELTKNQVSLTCLVKGF |
| | YPSDIAVWWESYGTEWSSYRTTPPVLDSDGSFFLYSKLTVTGEEWQQ |
| | GFVFTCWVMHEALHNHYTQKSLSLSPGK (SEQ ID NO: 2223) |
| Clone CH3C.35.21.16 | APELLGGPSVFLFPPKPKDTLMISRTPEVTCVVVDVSHEDPEVKFNWY |
| | VDGVEVHNAKTKPREEQYNSTYRVVSVLTVLHQDWLNGKEYKCKV |
| | SNKALPAPIEKTISKAKGQPREPQVYTLPPSRDELTKNQVSLTCLVKGF |
| | YPSDIAVWWESYGTEWSSYRTTPPVLDSDGSFFLYSKLTVTREEWQQ |
| | GFVFTCGVMHEALHNHYTQKSLSLSPGK (SEQ ID NO: 2224) |
| Clone CH3C.35.21.18 | APELLGGPSVFLFPPKPKDTLMISRTPEVTCVVVDVSHEDPEVKFNWY |
| | VDGVEVHNAKTKPREEQYNSTYRVVSVLTVLHQDWLNGKEYKCKV |
| | SNKALPAPIEKTISKAKGQPREPQVYTLPPSRDELTKNQVSLTCLVKGF |
| | YPSDIAVLWESYGTEWSSYRTTPPVLDSDGSFFLYSKLTVTKEEWQQG |
| | FVFSCSVMHEALHNHYTQKSLSLSPGK (SEQ ID NO: 2225) |
| Clone CH3B.1 | APELLGGPSVFLFPPKPKDTLMISRTPEVTCVVVDVSHEDPEVKFNWY |
| | VDGVEVHNAKTKPREEQYNSTYRVVSVLTVLHQDWLNGKEYKCKV |
| | SNKALPAPIEKTISKAKGQPRFDYVTTLPPSRDELTKNQVSLTCLVKGF |
| | YPSDIAVEWESNGQPENNYKTTPPVLDSDGSFFLYSKLTVDKSRWQQ |
| | GNVFSCSVMHEALHNHYGFHDLSLSPGK (SEQ ID NO: 2226) |
| Clone CH3B.2 | APELLGGPSVFLFPPKPKDTLMISRTPEVTCVVVDVSHEDPEVKFNWY |
| | VDGVEVHNAKTKPREEQYNSTYRVVSVLTVLHQDWLNGKEYKCKV |
| | SNKALPAPIEKTISKAKGQPRFDMVTTLPPSRDELTKNQVSLTCLVKGF |
| | YPSDIAVEWESNGQPENNYKTTPPVLDSDGSFFLYSKLTVDKSRWQQ |
| | GNVFSCSVMHEALHNHYGFHDLSLSPGK (SEQ ID NO: 2227) |
| Clone CH3B.3 | APELLGGPSVFLFPPKPKDTLMISRTPEVTCVVVDVSHEDPEVKFNWY |
| | VDGVEVHNAKTKPREEQYNSTYRVVSVLTVLHQDWLNGKEYKCKV |
| | SNKALPAPIEKTISKAKGQPRFEYVTTLPPSRDELTKNQVSLTCLVKGF |
| | YPSDIAVEWESNGQPENNYKTTPPVLDSDGSFFLYSKLTVDKSRWQQ |
| | GNVFSCSVMHEALHNHYGFHDLSLSPGK (SEQ ID NO: 2228) |
| Clone CH3B.4 | APELLGGPSVFLFPPKPKDTLMISRTPEVTCVVVDVSHEDPEVKFNWY |
| | VDGVEVHNAKTKPREEQYNSTYRVVSVLTVLHQDWLNGKEYKCKV |
| | SNKALPAPIEKTISKAKGQPRFEMVTTLPPSRDELTKNQVSLTCLVKGF |
| | YPSDIAVEWESNGQPENNYKTTPPVLDSDGSFFLYSKLTVDKSRWQQ |
| | GNVFSCSVMHEALHNHYGFHDLSLSPGK (SEQ ID NO: 2229) |
| Clone CH3B.5 | APELLGGPSVFLFPPKPKDTLMISRTPEVTCVVVDVSHEDPEVKFNWY |
| | VDGVEVHNAKTKPREEQYNSTYRVVSVLTVLHQDWLNGKEYKCKV |
| | SNKALPAPIEKTISKAKGQPRFELVTTLPPSRDELTKNQVSLTCLVKGF |
| | YPSDIAVEWESNGQPENNYKTTPPVLDSDGSFFLYSKLTVDKSRWQQ |
| | GNVFSCSVMHEALHNHYGFHDLSLSPGK (SEQ ID NO: 2230) |
| Clone CH2A2.1 | APELLGGPSVFLFPPKPKDTLMISRTPEVTCVVVDVSHEDPEVEFIWYV |
| | DGVDVRYEWQLPREEQYNSTYRVVSVLTVLHQDWLNGKEYKCKVS |
| | NKALPAPIEKTISKAKGQPREPQVYTLPPSRDELTKNQVSLTCLVKGFY |
| | PSDIAVEWESNGQPENNYKTTPPVLDSDGSFFLYSKLTVDKSRWQQG |
| | NVFSCSVMHEALHNHYTQKSLSLSPGK (SEQ ID NO: 2231) |
| Clone CH2A2.2 | APELLGGPSVFLFPPKPKDTLMISRTPEVTCVVVDVSHEDPEVGFVWY |
| | VDGVPVSWEWYWPREEQYNSTYRVVSVLTVLHQDWLNGKEYKCKV |
| | SNKALPAPIEKTISKAKGQPREPQVYTLPPSRDELTKNQVSLTCLVKGF |
| | YPSDIAVEWESNGQPENNYKTTPPVLDSDGSFFLYSKLTVDKSRWQQ |
| | GNVFSCSVMHEALHNHYTQKSLSLSPGK (SEQ ID NO: 2232) |
| Clone CH2A2.3 | APELLGGPSVFLFPPKPKDTLMISRTPEVTCVVVDVSHEDPEVQFDWY |
| | VDGVMVRREWHRPREEQYNSTYRVVSVLTVLHQDWLNGKEYKCKV |
| | SNKALPAPIEKTISKAKGQPREPQVYTLPPSRDELTKNQVSLTCLVKGF |
| | YPSDIAVEWESNGQPENNYKTTPPVLDSDGSFFLYSKLTVDKSRWQQ |
| | GNVFSCSVMHEALHNHYTQKSLSLSPGK (SEQ ID NO: 2233) |
| Clone CH2A2.4 | APELLGGPSVFLFPPKPKDTLMISRTPEVTCVVVDVSHEDPEVSFEWY |
| | VDGVPVRWEWQWPREEQYNSTYRVVSVLTVLHQDWLNGKEYKCK |
| | VSNKALPAPIEKTISKAKGQPREPQVYTLPPSRDELTKNQVSLTCLVKG |
| | FYPSDIAVEWESNGQPENNYKTTPPVLDSDGSFFLYSKLTVDKSRWQ |
| | QGNVFSCSVMHEALHNHYTQKSLSLSPGK (SEQ ID NO: 2234) |
| Clone CH2A2.5 | APELLGGPSVFLFPPKPKDTLMISRTPEVTCVVVDVSHEDPEVAFTWY |
| | VDGVPVRWEWQNPREEQYNSTYRVVSVLTVLHQDWLNGKEYKCKV |
| | SNKALPAPIEKTISKAKGQPREPQVYTLPPSRDELTKNQVSLTCLVKGF |
| | YPSDIAVEWESNGQPENNYKTTPPVLDSDGSFFLYSKLTVDKSRWQQ |
| | GNVFSCSVMHEALHNHYTQKSLSLSPGK (SEQ ID NO: 2235) |
| Clone CH2C.1 | APELLGGPSVFLFPPKPKDTLMISRTPEVTCVVVDPQTPPWEVKFNWY |
| | VDGVEVHNAKTKPREEEYYTYYRVVSVLTVLHQDWLNGKEYKCKV |
| | SNKALPAPIEKTISKAKGQPREPQVYTLPPSRDELTKNQVSLTCLVKGF |
| | YPSDIAVEWESNGQPENNYKTTPPVLDSDGSFFLYSKLTVDKSRWQQ |
| | GNVFSCSVMHEALHNHYTQKSLSLSPGK (SEQ ID NO: 2236) |
| Clone CH2C.2 | APELLGGPSVFLFPPKPKDTLMISRTPEVTCVVVDPPSPPWEVKFNWY |
| | VDGVEVHNAKTKPREEEYYSNYRVVSVLTVLHQDWLNGKEYKCKV |
| | SNKALPAPIEKTISKAKGQPREPQVYTLPPSRDELTKNQVSLTCLVKGF |
| | YPSDIAVEWESNGQPENNYKTTPPVLDSDGSFFLYSKLTVDKSRWQQ |
| | GNVFSCSVMHEALHNHYTQKSLSLSPGK (SEQ ID NO: 2237) |
| Clone CH2C.3 | APELLGGPSVFLFPPKPKDTLMISRTPEVTCVVVDPQTPPWEVKFNWY |
| | VDGVEVHNAKTKPREEEYYSNYRVVSVLTVLHQDWLNGKEYKCKV |
| | SNKALPAPIEKTISKAKGQPREPQVYTLPPSRDELTKNQVSLTCLVKGF |
| | YPSDIAVEWESNGQPENNYKTTPPVLDSDGSFFLYSKLTVDKSRWQQ |
| | GNVFSCSVMHEALHNHYTQKSLSLSPGK (SEQ ID NO: 2238) |
| Clone CH2C.4 | APELLGGPSVFLFPPKPKDTLMISRTPEVTCVVVDFRGPPWEVKFNWY |
| | VDGVEVHNAKTKPREEEYYHDYRVVSVLTVLHQDWLNGKEYKCKV |
| | SNKALPAPIEKTISKAKGQPREPQVYTLPPSRDELTKNQVSLTCLVKGF |
| | YPSDIAVEWESNGQPENNYKTTPPVLDSDGSFFLYSKLTVDKSRWQQ |
| | GNVFSCSVMHEALHNHYTQKSLSLSPGK (SEQ ID NO: 2239) |
| Clone CH2C.5 | APELLGGPSVFLFPPKPKDTLMISRTPEVTCVVVDPQTVPWEVKFNWY |
| | VDGVEVHNAKTKPREEEYYSNYRVVSVLTVLHQDWLNGKEYKCKV |
| | SNKALPAPIEKTISKAKGQPREPQVYTLPPSRDELTKNQVSLTCLVKGF |
| | YPSDIAVEWESNGQPENNYKTTPPVLDSDGSFFLYSKLTVDKSRWQQ |
| | GNVFSCSVMHEALHNHYTQKSLSLSPGK (SEQ ID NO: 2240) |
| Clone CH2D.1 | APELLGGPSVFLFPPKPKDTLMISRTPEVTCVVVDVSVPPRMVKFNWY |
| | VDGVEVHNAKTKSLTSQHNSTVRVVSVLTVLHQDWLNGKEYKCKVS |
| | NKALPAPIEKTISKAKGQPREPQVYTLPPSRDELTKNQVSLTCLVKGFY |
| | PSDIAVEWESNGQPENNYKTTPPVLDSDGSFFLYSKLTVDKSRWQQG |
| | NVFSCSVMHEALHNHYTQKSLSLSPGK (SEQ ID NO: 2241) |
| Clone CH2D.2 | APELLGGPSVFLFPPKPKDTLMISRTPEVTCVVVDVSVPPWMVKFNW |
| | YVDGVEVHNAKTKSLTSQHNSTVRVVSVLTVLHQDWLNGKEYKCK |
| | VSNKALPAPIEKTISKAKGQPREPQVYTLPPSRDELTKNQVSLTCLVKG |
| | FYPSDIAVEWESNGQPENNYKTTPPVLDSDGSFFLYSKLTVDKSRWQ |
| | QGNVFSCSVMHEALHNHYTQKSLSLSPGK (SEQ ID NO: 2242) |
| Clone CH2D.3 | APELLGGPSVFLFPPKPKDTLMISRTPEVTCVVVDVSDMWEYVKFNW |
| | YVDGVEVHNAKTKPWVKQLNSTWRVVSVLTVLHQDWLNGKEYKC |
| | KVSNKALPAPIEKTISKAKGQPREPQVYTLPPSRDELTKNQVSLTCLVK |
| | GFYPSDIAVEWESNGQPENNYKTTPPVLDSDGSFFLYSKLTVDKSRW |
| | QQGNVFSCSVMHEALHNHYTQKSLSLSPGK (SEQ ID NO: 2243) |
| Clone CH2D.4 | APELLGGPSVFLFPPKPKDTLMISRTPEVTCVVVDVSDDWTWVKFNW |
| | YVDGVEVHNAKTKPWIAQPNSTWRVVSVLTVLHQDWLNGKEYKCK |
| | VSNKALPAPIEKTISKAKGQPREPQVYTLPPSRDELTKNQVSLTCLVKG |
| | FYPSDIAVEWESNGQPENNYKTTPPVLDSDGSFFLYSKLTVDKSRWQ |
| | QGNVFSCSVMHEALHNHYTQKSLSLSPGK (SEQ ID NO: 2244) |
| Clone CH2D.5 | APELLGGPSVFLFPPKPKDTLMISRTPEVTCVVVDVSDDWEWVKFNW |
| | YVDGVEVHNAKTKPWKLQLNSTWRVVSVLTVLHQDWLNGKEYKCK |
| | VSNKALPAPIEKTISKAKGQPREPQVYTLPPSRDELTKNQVSLTCLVKG |
| | FYPSDIAVEWESNGQPENNYKTTPPVLDSDGSFFLYSKLTVDKSRWQ |
| | QGNVFSCSVMHEALHNHYTQKSLSLSPGK (SEQ ID NO: 2245) |
| Clone CH2E3.1 | APELLGGPSVFLFPPKPKDTLMISRTPEVTCVVVDVSHEDPWVWFYW |
| | YVDGVEVHNAKTKPREEQYNSTYRVVSVLTVLHQDWLNGKEYKCS |
| | VVNIALWWSIEKTISKAKGQPREPQVYTLPPSRDELTKNQVSLTCLVK |
| | GFYPSDIAVEWESNGQPENNYKTTPPVLDSDGSFFLYSKLTVDKSRW |
| | QQGNVFSCSVMHEALHNHYTQKSLSLSPGK (SEQ ID NO: 2246) |
| Clone CH2E3.2 | APELLGGPSVFLFPPKPKDTLMISRTPEVTCVVVDVSHEDPVVGFRWY |
| | VDGVEVHNAKTKPREEQYNSTYRVVSVLTVLHQDWLNGKEYKCRVS |
| | NSALTWKIEKTISKAKGQPREPQVYTLPPSRDELTKNQVSLTCLVKGF |
| | YPSDIAVEWESNGQPENNYKTTPPVLDSDGSFFLYSKLTVDKSRWQQ |
| | GNVFSCSVMHEALHNHYTQKSLSLSPGK (SEQ ID NO: 2247) |
| Clone CH2E3.3 | APELLGGPSVFLFPPKPKDTLMISRTPEVTCVVVDVSHEDPVVGFRWY |
| | VDGVEVHNAKTKPREEQYNSTYRVVSVLTVLHQDWLNGKEYKCRVS |
| | NSALSWRIEKTISKAKGQPREPQVYTLPPSRDELTKNQVSLTCLVKGF |
| | YPSDIAVEWESNGQPENNYKTTPPVLDSDGSFFLYSKLTVDKSRWQQ |
| | GNVFSCSVMHEALHNHYTQKSLSLSPGK (SEQ ID NO: 2248) |
| Clone CH2E3.4 | APELLGGPSVFLFPPKPKDTLMISRTPEVTCVVVDVSHEDPIVGFRWY |
| | VDGVEVHNAKTKPREEQYNSTYRVVSVLTVLHQDWLNGKEYKCRVS |
| | NSALRWRIEKTISKAKGQPREPQVYTLPPSRDELTKNQVSLTCLVKGF |
| | YPSDIAVEWESNGQPENNYKTTPPVLDSDGSFFLYSKLTVDKSRWQQ |
| | GNVFSCSVMHEALHNHYTQKSLSLSPGK (SEQ ID NO: 2249) |
| Clone CH2E3.5 | APELLGGPSVFLFPPKPKDTLMISRTPEVTCVVVDVSHEDPAVGFEWY |
| | VDGVEVHNAKTKPREEQYNSTYRVVSVLTVLHQDWLNGKEYKCQV |
| | FNWALDWVIEKTISKAKGQPREPQVYTLPPSRDELTKNQVSLTCLVK |
| | GFYPSDIAVEWESNGQPENNYKTTPPVLDSDGSFFLYSKLTVDKSRW |
| | QQGNVFSCSVMHEALHNHYTQKSLSLSPGK (SEQ ID NO: 2250) |
| Fc sequence with hole | APELLGGPSVFLFPPKPKDTLMISRTPEVTCVVVDVSHEDPEVKFNWY |
| mutations | VDGVEVHNAKTKPREEQYNSTYRVVSVLTVLHQDWLNGKEYKCKV |
| | SNKALPAPIEKTISKAKGQPREPQVYTLPPSRDELTKNQVSLSCAVKGF |
| | YPSDIAVEWESNGQPENNYKTTPPVLDSDGSFFLVSKLTVDKSRWQQ |
| | GNVFSCSVMHEALHNHYTQKSLSLSPGK (SEQ ID NO: 2251) |
| Fc sequence with hole | APEAAGGPSVFLFPPKPKDTLMISRTPEVTCVVVDVSHEDPEVKFNWY |
| and LALA mutations | VDGVEVHNAKTKPREEQYNSTYRVVSVLTVLHQDWLNGKEYKCKV |
| | SNKALPAPIEKTISKAKGQPREPQVYTLPPSRDELTKNQVSLSCAVKGF |
| | YPSDIAVEWESNGQPENNYKTTPPVLDSDGSFFLVSKLTVDKSRWQQ |
| | GNVFSCSVMHEALHNHYTQKSLSLSPGK (SEQ ID NO: 2252) |
| Fc sequence with hole | APELLGGPSVFLFPPKPKDTLYITREPEVTCVVVDVSHEDPEVKFNWY |
| and YTE mutations | VDGVEVHNAKTKPREEQYNSTYRVVSVLTVLHQDWLNGKEYKCKV |
| | SNKALPAPIEKTISKAKGQPREPQVYTLPPSRDELTKNQVSLSCAVKGF |
| | YPSDIAVEWESNGQPENNYKTTPPVLDSDGSFFLVSKLTVDKSRWQQ |
| | GNVFSCSVMHEALHNHYTQKSLSLSPGK (SEQ ID NO: 2253) |
| Fc sequence with | APEAAGGPSVFLFPPKPKDTLYITREPEVTCVVVDVSHEDPEVKFNWY |
| hole, LALA, and YTE | VDGVEVHNAKTKPREEQYNSTYRVVSVLTVLHQDWLNGKEYKCKV |
| mutations | SNKALPAPIEKTISKAKGQPREPQVYTLPPSRDELTKNQVSLSCAVKGF |
| | YPSDIAVEWESNGQPENNYKTTPPVLDSDGSFFLVSKLTVDKSRWQQ |
| | GNVFSCSVMHEALHNHYTQKSLSLSPGK (SEQ ID NO: 2254) |
| Fc sequence with | APELLGGPSVFLFPPKPKDTLMISRTPEVTCVVVDVSHEDPEVKFNWY |
| knob mutation | VDGVEVHNAKTKPREEQYNSTYRVVSVLTVLHQDWLNGKEYKCKV |
| | SNKALPAPIEKTISKAKGQPREPQVYTLPPSRDELTKNQVSLWCLVKG |
| | FYPSDIAVEWESNGQPENNYKTTPPVLDSDGSFFLYSKLTVDKSRWQ |
| | QGNVFSCSVMHEALHNHYTQKSLSLSPGK(SEQ ID NO: 2255) |
| Fc sequence with | APEAAGGPSVFLFPPKPKDTLMISRTPEVTCVVVDVSHEDPEVKFNWY |
| knob and LALA | VDGVEVHNAKTKPREEQYNSTYRVVSVLTVLHQDWLNGKEYKCKV |
| mutations | SNKALPAPIEKTISKAKGQPREPQVYTLPPSRDELTKNQVSLWCLVKG |
| | FYPSDIAVEWESNGQPENNYKTTPPVLDSDGSFFLYSKLTVDKSRWQ |
| | QGNVFSCSVMHEALHNHYTQKSLSLSPGK (SEQ ID NO: 2256) |
| Fc sequence with | APELLGGPSVFLFPPKPKDTLYITREPEVTCVVVDVSHEDPEVKFNWY |
| knob and YTE | VDGVEVHNAKTKPREEQYNSTYRVVSVLTVLHQDWLNGKEYKCKV |
| mutations | SNKALPAPIEKTISKAKGQPREPQVYTLPPSRDELTKNQVSLWCLVKG |
| | FYPSDIAVEWESNGQPENNYKTTPPVLDSDGSFFLYSKLTVDKSRWQ |
| | QGNVFSCSVMHEALHNHYTQKSLSLSPGK (SEQ ID NO: 2257) |
| Fc sequence with | APEAAGGPSVFLFPPKPKDTLYITREPEVTCVVVDVSHEDPEVKFNWY |
| knob, LALA, and | VDGVEVHNAKTKPREEQYNSTYRVVSVLTVLHQDWLNGKEYKCKV |
| YTE mutations | SNKALPAPIEKTISKAKGQPREPQVYTLPPSRDELTKNQVSLWCLVKG |
| | FYPSDIAVEWESNGQPENNYKTTPPVLDSDGSFFLYSKLTVDKSRWQ |
| | QGNVFSCSVMHEALHNHYTQKSLSLSPGK (SEQ ID NO: 2258) |
| Clone CH3C.35.21 | APELLGGPSVFLFPPKPKDTLMISRTPEVTCVVVDVSHEDPEVKFNWY |
| with knob mutation | VDGVEVHNAKTKPREEQYNSTYRVVSVLTVLHQDWLNGKEYKCKV |
| | SNKALPAPIEKTISKAKGQPREPQVYTLPPSRDELTKNQVSLWCLVKG |
| | FYPSDIAVWWESYGTEWSSYKTTPPVLDSDGSFFLYSKLTVTKEEWQ |
| | QGFVFSCSVMHEALHNHYTQKSLSLSPGK (SEQ ID NO: 2259) |
| Clone CH3C.35.21 | APEAAGGPSVFLFPPKPKDTLMISRTPEVTCVVVDVSHEDPEVKFNWY |
| with knob and LALA | VDGVEVHNAKTKPREEQYNSTYRVVSVLTVLHQDWLNGKEYKCKV |
| mutations | SNKALPAPIEKTISKAKGQPREPQVYTLPPSRDELTKNQVSLWCLVKG |
| | FYPSDIAVWWESYGTEWSSYKTTPPVLDSDGSFFLYSKLTVTKEEWQ |
| | QGFVFSCSVMHEALHNHYTQKSLSLSPGK (SEQ ID NO: 2260) |
| | APELLGGPSVFLFPPKPKDTLYITREPEVTCVVVDVSHEDPEVKFNWY |
| Clone CH3C.35.21 | VDGVEVHNAKTKPREEQYNSTYRVVSVLTVLHQDWLNGKEYKCKV |
| with knob and YTE | SNKALPAPIEKTISKAKGQPREPQVYTLPPSRDELTKNQVSLWCLVKG |
| mutations | FYPSDIAVWWESYGTEWSSYKTTPPVLDSDGSFFLYSKLTVTKEEWQ |
| | QGFVFSCSVMHEALHNHYTQKSLSLSPGK (SEQ ID NO: 2261) |
| Clone CH3C.35.21 | APEAAGGPSVFLFPPKPKDTLYITREPEVTCVVVDVSHEDPEVKFNWY |
| with knob, LALA, | VDGVEVHNAKTKPREEQYNSTYRVVSVLTVLHQDWLNGKEYKCKV |
| and YTE mutations | SNKALPAPIEKTISKAKGQPREPQVYTLPPSRDELTKNQVSLWCLVKG |
| | FYPSDIAVWWESYGTEWSSYKTTPPVLDSDGSFFLYSKLTVTKEEWQ |
| | QGFVFSCSVMHEALHNHYTQKSLSLSPGK (SEQ ID NO: 2262) |
| Clone CH3C.35.21 | APELLGGPSVFLFPPKPKDTLMISRTPEVTCVVVDVSHEDPEVKFNWY |
| with hole mutations | VDGVEVHNAKTKPREEQYNSTYRVVSVLTVLHQDWLNGKEYKCKV |
| | SNKALPAPIEKTISKAKGQPREPQVYTLPPSRDELTKNQVSLSCAVKGF |
| | YPSDIAVWWESYGTEWSSYKTTPPVLDSDGSFFLVSKLTVTKEEWQQ |
| | GFVFSCSVMHEALHNHYTQKSLSLSPGK (SEQ ID NO: 2263) |
| Clone CH3C.35.21 | APEAAGGPSVFLFPPKPKDTLMISRTPEVTCVVVDVSHEDPEVKFNWY |
| with hole and LALA | VDGVEVHNAKTKPREEQYNSTYRVVSVLTVLHQDWLNGKEYKCKV |
| mutations | SNKALPAPIEKTISKAKGQPREPQVYTLPPSRDELTKNQVSLSCAVKGF |
| | YPSDIAVWWESYGTEWSSYKTTPPVLDSDGSFFLVSKLTVTKEEWQQ |
| | GFVFSCSVMHEALHNHYTQKSLSLSPGK (SEQ ID NO: 2264) |
| Clone CH3C.35.21 | APELLGGPSVFLFPPKPKDTLYITREPEVTCVVVDVSHEDPEVKFNWY |
| with hole and YTE | VDGVEVHNAKTKPREEQYNSTYRVVSVLTVLHQDWLNGKEYKCKV |
| mutations | SNKALPAPIEKTISKAKGQPREPQVYTLPPSRDELTKNQVSLSCAVKGF |
| | YPSDIAVWWESYGTEWSSYKTTPPVLDSDGSFFLVSKLTVTKEEWQQ |
| | GFVFSCSVMHEALHNHYTQKSLSLSPGK (SEQ ID NO: 2265) |
| Clone CH3C.35.21 | APEAAGGPSVFLFPPKPKDTLYITREPEVTCVVVDVSHEDPEVKFNWY |
| with hole, LALA, and | VDGVEVHNAKTKPREEQYNSTYRVVSVLTVLHQDWLNGKEYKCKV |
| YTE mutations | SNKALPAPIEKTISKAKGQPREPQVYTLPPSRDELTKNQVSLSCAVKGF |
| | YPSDIAVWWESYGTEWSSYKTTPPVLDSDGSFFLVSKLTVTKEEWQQ |
| | GFVFSCSVMHEALHNHYTQKSLSLSPGK (SEQ ID NO: 2266) |
| Clone CH3C.35.20.1 | APELLGGPSVFLFPPKPKDTLMISRTPEVTCVVVDVSHEDPEVKFNWY |
| with knob mutation | VDGVEVHNAKTKPREEQYNSTYRVVSVLTVLHQDWLNGKEYKCKV |
| | SNKALPAPIEKTISKAKGQPREPQVYTLPPSRDELTKNQVSLWCLVKG |
| | FYPSDIAVEWESFGTEWSSYKTTPPVLDSDGSFFLYSKLTVTKEEWQQ |
| | GFVFSCSVMHEALHNHYTQKSLSLSPGK (SEQ ID NO: 2267) |
| Clone CH3C.35.20.1 | APEAAGGPSVFLFPPKPKDTLMISRTPEVTCVVVDVSHEDPEVKFNWY |
| with knob and LALA | VDGVEVHNAKTKPREEQYNSTYRVVSVLTVLHQDWLNGKEYKCKV |
| mutations | SNKALPAPIEKTISKAKGQPREPQVYTLPPSRDELTKNQVSLWCLVKG |
| | FYPSDIAVEWESFGTEWSSYKTTPPVLDSDGSFFLYSKLTVTKEEWQQ |
| | GFVFSCSVMHEALHNHYTQKSLSLSPGK (SEQ ID NO: 2268) |
| Clone CH3C.35.20.1 | APEAAGGPSVFLFPPKPKDTLMISRTPEVTCVVVDVSHEDPEVKFNWY |
| with knob and | VDGVEVHNAKTKPREEQYNSTYRVVSVLTVLHQDWLNGKEYKCKV |
| LALAPG mutations | SNKALGAPIEKTISKAKGQPREPQVYTLPPSRDELTKNQVSLWCLVKG |
| | FYPSDIAVEWESFGTEWSSYKTTPPVLDSDGSFFLYSKLTVTKEEWQQ |
| | GFVFSCSVMHEALHNHYTQKSLSLSPGK (SEQ ID NO: 2269) |
| Clone CH3C.35.20.1 | APELLGGPSVFLFPPKPKDTLYITREPEVTCVVVDVSHEDPEVKFNWY |
| with knob and YTE | VDGVEVHNAKTKPREEQYNSTYRVVSVLTVLHQDWLNGKEYKCKV |
| mutations | SNKALPAPIEKTISKAKGQPREPQVYTLPPSRDELTKNQVSLWCLVKG |
| | FYPSDIAVEWESFGTEWSSYKTTPPVLDSDGSFFLYSKLTVTKEEWQQ |
| | GFVFSCSVMHEALHNHYTQKSLSLSPGK (SEQ ID NO: 2270) |
| Clone CH3C.35.20.1 | APEAAGGPSVFLFPPKPKDTLYITREPEVTCVVVDVSHEDPEVKFNWY |
| with knob, LALA, | VDGVEVHNAKTKPREEQYNSTYRVVSVLTVLHQDWLNGKEYKCKV |
| and YTE mutations | SNKALPAPIEKTISKAKGQPREPQVYTLPPSRDELTKNQVSLWCLVKG |
| | FYPSDIAVEWESFGTEWSSYKTTPPVLDSDGSFFLYSKLTVTKEEWQQ |
| | GFVFSCSVMHEALHNHYTQKSLSLSPGK (SEQ ID NO: 2271) |
| Clone CH3C.35.20.1 | APEAAGGPSVFLFPPKPKDTLYITREPEVTCVVVDVSHEDPEVKFNWY |
| with knob, LALAPG, | VDGVEVHNAKTKPREEQYNSTYRVVSVLTVLHQDWLNGKEYKCKV |
| and YTE mutations | SNKALGAPIEKTISKAKGQPREPQVYTLPPSRDELTKNQVSLWCLVKG |
| | FYPSDIAVEWESFGTEWSSYKTTPPVLDSDGSFFLYSKLTVTKEEWQQ |
| | GFVFSCSVMHEALHNHYTQKSLSLSPGK (SEQ ID NO: 2272) |
| Clone CH3C.35.20.1 | APELLGGPSVFLFPPKPKDTLMISRTPEVTCVVVDVSHEDPEVKFNWY |
| hole mutations | VDGVEVHNAKTKPREEQYNSTYRVVSVLTVLHQDWLNGKEYKCKV |
| | SNKALPAPIEKTISKAKGQPREPQVYTLPPSRDELTKNQVSLSCAVKGF |
| | YPSDIAVEWESFGTEWSSYKTTPPVLDSDGSFFLVSKLTVTKEEWQQG |
| | FVFSCSVMHEALHNHYTQKSLSLSPGK (SEQ ID NO: 2273) |
| CloneCH3C.35.20.1 | APEAAGGPSVFLFPPKPKDTLMISRTPEVTCVVVDVSHEDPEVKFNWY |
| with hole and LALA | VDGVEVHNAKTKPREEQYNSTYRVVSVLTVLHQDWLNGKEYKCKV |
| mutations | SNKALPAPIEKTISKAKGQPREPQVYTLPPSRDELTKNQVSLSCAVKGF |
| | YPSDIAVEWESFGTEWSSYKTTPPVLDSDGSFFLVSKLTVTKEEWQQG |
| | FVFSCSVMHEALHNHYTQKSLSLSPGK (SEQ ID NO: 2274) |
| Clone CH3C.35.20.1 | APEAAGGPSVFLFPPKPKDTLMISRTPEVTCVVVDVSHEDPEVKFNWY |
| with hole and | VDGVEVHNAKTKPREEQYNSTYRVVSVLTVLHQDWLNGKEYKCKV |
| LALAPG mutations | SNKALGAPIEKTISKAKGQPREPQVYTLPPSRDELTKNQVSLSCAVKG |
| | FYPSDIAVEWESFGTEWSSYKTTPPVLDSDGSFFLVSKLTVTKEEWQQ |
| | GFVFSCSVMHEALHNHYTQKSLSLSPGK (SEQ ID NO: 2275) |
| Clone CH3C.35.20.1 | APELLGGPSVFLFPPKPKDTLYITREPEVTCVVVDVSHEDPEVKFNWY |
| with hole and YTE | VDGVEVHNAKTKPREEQYNSTYRVVSVLTVLHQDWLNGKEYKCKV |
| mutations | SNKALPAPIEKTISKAKGQPREPQVYTLPPSRDELTKNQVSLSCAVKGF |
| | YPSDIAVEWESFGTEWSSYKTTPPVLDSDGSFFLVSKLTVTKEEWQQG |
| | FVFSCSVMHEALHNHYTQKSLSLSPGK (SEQ ID NO: 2276) |
| Clone CH3C.35.20.1 | APEAAGGPSVFLFPPKPKDTLYITREPEVTCVVVDVSHEDPEVKFNWY |
| with hole, LALA, and | VDGVEVHNAKTKPREEQYNSTYRVVSVLTVLHQDWLNGKEYKCKV |
| YTE mutations | SNKALPAPIEKTISKAKGQPREPQVYTLPPSRDELTKNQVSLSCAVKGF |
| | YPSDIAVEWESFGTEWSSYKTTPPVLDSDGSFFLVSKLTVTKEEWQQG |
| | FVFSCSVMHEALHNHYTQKSLSLSPGK (SEQ ID NO: 2277) |
| Clone CH3C.35.20.1 | APEAAGGPSVFLFPPKPKDTLYITREPEVTCVVVDVSHEDPEVKFNWY |
| with hole, LALAPG, | VDGVEVHNAKTKPREEQYNSTYRVVSVLTVLHQDWLNGKEYKCKV |
| and YTE mutations | SNKALGAPIEKTISKAKGQPREPQVYTLPPSRDELTKNQVSLSCAVKG |
| | FYPSDIAVEWESFGTEWSSYKTTPPVLDSDGSFFLVSKLTVTKEEWQQ |
| | GFVFSCSVMHEALHNHYTQKSLSLSPGK (SEQ ID NO: 2278) |
| Clone CH3C.35.23.2 | APELLGGPSVFLFPPKPKDTLMISRTPEVTCVVVDVSHEDPEVKFNWY |
| with knob mutation | VDGVEVHNAKTKPREEQYNSTYRVVSVLTVLHQDWLNGKEYKCKV |
| | SNKALPAPIEKTISKAKGQPREPQVYTLPPSRDELTKNQVSLWCLVKG |
| | FYPSDIAVEWESYGTEWANYKTTPPVLDSDGSFFLYSKLTVTKEEWQ |
| | QGFVFSCSVMHEALHNHYTQKSLSLSPGK (SEQ ID NO: 2279) |
| Clone CH3C.35.23.2 | APEAAGGPSVFLFPPKPKDTLMISRTPEVTCVVVDVSHEDPEVKFNWY |
| with knob and LALA | VDGVEVHNAKTKPREEQYNSTYRVVSVLTVLHQDWLNGKEYKCKV |
| mutations | SNKALPAPIEKTISKAKGQPREPQVYTLPPSRDELTKNQVSLWCLVKG |
| | FYPSDIAVEWESYGTEWANYKTTPPVLDSDGSFFLYSKLTVTKEEWQ |
| | QGFVFSCSVMHEALHNHYTQKSLSLSPGK (SEQ ID NO: 2280) |
| Clone CH3C.35.23.2 | APEAAGGPSVFLFPPKPKDTLMISRTPEVTCVVVDVSHEDPEVKFNWY |
| with knob and | VDGVEVHNAKTKPREEQYNSTYRVVSVLTVLHQDWLNGKEYKCKV |
| LALAPG mutations | SNKALGAPIEKTISKAKGQPREPQVYTLPPSRDELTKNQVSLWCLVKG |
| | FYPSDIAVEWESYGTEWANYKTTPPVLDSDGSFFLYSKLTVTKEEWQ |
| | QGFVFSCSVMHEALHNHYTQKSLSLSPGK (SEQ ID NO: 2281) |
| Clone CH3C.35.23.2 | APELLGGPSVFLFPPKPKDTLYITREPEVTCVVVDVSHEDPEVKFNWY |
| with knob and YTE | VDGVEVHNAKTKPREEQYNSTYRVVSVLTVLHQDWLNGKEYKCKV |
| mutations | SNKALPAPIEKTISKAKGQPREPQVYTLPPSRDELTKNQVSLWCLVKG |
| | FYPSDIAVEWESYGTEWANYKTTPPVLDSDGSFFLYSKLTVTKEEWQ |
| | QGFVFSCSVMHEALHNHYTQKSLSLSPGK (SEQ ID NO: 2282) |
| Clone CH3C.35.23.2 | APEAAGGPSVFLFPPKPKDTLYITREPEVTCVVVDVSHEDPEVKFNWY |
| with knob, LALA, | VDGVEVHNAKTKPREEQYNSTYRVVSVLTVLHQDWLNGKEYKCKV |
| and YTE mutations | SNKALPAPIEKTISKAKGQPREPQVYTLPPSRDELTKNQVSLWCLVKG |
| | FYPSDIAVEWESYGTEWANYKTTPPVLDSDGSFFLYSKLTVTKEEWQ |
| | QGFVFSCSVMHEALHNHYTQKSLSLSPGK (SEQ ID NO: 2283) |
| Clone CH3C.35.23.2 | APEAAGGPSVFLFPPKPKDTLYITREPEVTCVVVDVSHEDPEVKFNWY |
| with knob, LALAPG, | VDGVEVHNAKTKPREEQYNSTYRVVSVLTVLHQDWLNGKEYKCKV |
| and YTE mutations | SNKALGAPIEKTISKAKGQPREPQVYTLPPSRDELTKNQVSLWCLVKG |
| | FYPSDIAVEWESYGTEWANYKTTPPVLDSDGSFFLYSKLTVTKEEWQ |
| | QGFVFSCSVMHEALHNHYTQKSLSLSPGK (SEQ ID NO: 2284) |
| Clone CH3C.35.23.2 | APELLGGPSVFLFPPKPKDTLMISRTPEVTCVVVDVSHEDPEVKFNWY |
| with hole mutations | VDGVEVHNAKTKPREEQYNSTYRVVSVLTVLHQDWLNGKEYKCKV |
| | SNKALPAPIEKTISKAKGQPREPQVYTLPPSRDELTKNQVSLSCAVKGF |
| | YPSDIAVEWESYGTEWANYKTTPPVLDSDGSFFLVSKLTVTKEEWQQ |
| | GFVFSCSVMHEALHNHYTQKSLSLSPGK (SEQ ID NO: 2285) |
| Clone CH3C.35.23.2 | APEAAGGPSVFLFPPKPKDTLMISRTPEVTCVVVDVSHEDPEVKFNWY |
| with hole and LALA | VDGVEVHNAKTKPREEQYNSTYRVVSVLTVLHQDWLNGKEYKCKV |
| mutations | SNKALPAPIEKTISKAKGQPREPQVYTLPPSRDELTKNQVSLSCAVKGF |
| | YPSDIAVEWESYGTEWANYKTTPPVLDSDGSFFLVSKLTVTKEEWQQ |
| | GFVFSCSVMHEALHNHYTQKSLSLSPGK (SEQ ID NO: 2286) |
| Clone CH3C.35.23.2 | APEAAGGPSVFLFPPKPKDTLMISRTPEVTCVVVDVSHEDPEVKFNWY |
| with hole and | VDGVEVHNAKTKPREEQYNSTYRVVSVLTVLHQDWLNGKEYKCKV |
| LALAPG mutations | SNKALGAPIEKTISKAKGQPREPQVYTLPPSRDELTKNQVSLSCAVKG |
| | FYPSDIAVEWESYGTEWANYKTTPPVLDSDGSFFLVSKLTVTKEEWQ |
| | QGFVFSCSVMHEALHNHYTQKSLSLSPGK (SEQ ID NO: 2287) |
| Clone CH3C.35.23.2 | APELLGGPSVFLFPPKPKDTLYITREPEVTCVVVDVSHEDPEVKFNWY |
| with hole and YTE | VDGVEVHNAKTKPREEQYNSTYRVVSVLTVLHQDWLNGKEYKCKV |
| mutations | SNKALPAPIEKTISKAKGQPREPQVYTLPPSRDELTKNQVSLSCAVKGF |
| | YPSDIAVEWESYGTEWANYKTTPPVLDSDGSFFLVSKLTVTKEEWQQ |
| | GFVFSCSVMHEALHNHYTQKSLSLSPGK (SEQ ID NO: 2288) |
| Clone CH3C.35.23.2 | APEAAGGPSVFLFPPKPKDTLYITREPEVTCVVVDVSHEDPEVKFNWY |
| with hole, LALA, and | VDGVEVHNAKTKPREEQYNSTYRVVSVLTVLHQDWLNGKEYKCKV |
| YTE mutations | SNKALPAPIEKTISKAKGQPREPQVYTLPPSRDELTKNQVSLSCAVKGF |
| | YPSDIAVEWESYGTEWANYKTTPPVLDSDGSFFLVSKLTVTKEEWQQ |
| | GFVFSCSVMHEALHNHYTQKSLSLSPGK (SEQ ID NO: 2289) |
| Clone CH3C.35.23.2 | APEAAGGPSVFLFPPKPKDTLYITREPEVTCVVVDVSHEDPEVKFNWY |
| with hole, LALAPG, | VDGVEVHNAKTKPREEQYNSTYRVVSVLTVLHQDWLNGKEYKCKV |
| and YTE mutations | SNKALGAPIEKTISKAKGQPREPQVYTLPPSRDELTKNQVSLSCAVKG |
| | FYPSDIAVEWESYGTEWANYKTTPPVLDSDGSFFLVSKLTVTKEEWQ |
| | QGFVFSCSVMHEALHNHYTQKSLSLSPGK (SEQ ID NO: 2290) |
| Clone CH3C.35.23.3 | APELLGGPSVFLFPPKPKDTLMISRTPEVTCVVVDVSHEDPEVKFNWY |
| with knob mutation | VDGVEVHNAKTKPREEQYNSTYRVVSVLTVLHQDWLNGKEYKCKV |
| | SNKALPAPIEKTISKAKGQPREPQVYTLPPSRDELTKNQVSLWCLVKG |
| | FYPSDIAVEWESYGTEWVNYKTTPPVLDSDGSFFLYSKLTVTKEEWQ |
| | QGFVFSCSVMHEALHNHYTQKSLSLSPGK (SEQ ID NO: 2291) |
| Clone CH3C.35.23.3 | APEAAGGPSVFLFPPKPKDTLMISRTPEVTCVVVDVSHEDPEVKFNWY |
| with knob and LALA | VDGVEVHNAKTKPREEQYNSTYRVVSVLTVLHQDWLNGKEYKCKV |
| mutations | SNKALPAPIEKTISKAKGQPREPQVYTLPPSRDELTKNQVSLWCLVKG |
| | FYPSDIAVEWESYGTEWVNYKTTPPVLDSDGSFFLYSKLTVTKEEWQ |
| | QGFVFSCSVMHEALHNHYTQKSLSLSPGK (SEQ ID NO: 2292) |
| Clone CH3C.35.23.3 | APEAAGGPSVFLFPPKPKDTLMISRTPEVTCVVVDVSHEDPEVKFNWY |
| with knob and | VDGVEVHNAKTKPREEQYNSTYRVVSVLTVLHQDWLNGKEYKCKV |
| LALAPG mutations | SNKALGAPIEKTISKAKGQPREPQVYTLPPSRDELTKNQVSLWCLVKG |
| | FYPSDIAVEWESYGTEWVNYKTTPPVLDSDGSFFLYSKLTVTKEEWQ |
| | QGFVFSCSVMHEALHNHYTQKSLSLSPGK (SEQ ID NO: 2293) |
| Clone CH3C.35.23.3 | APELLGGPSVFLFPPKPKDTLYITREPEVTCVVVDVSHEDPEVKFNWY |
| with knob and YTE | VDGVEVHNAKTKPREEQYNSTYRVVSVLTVLHQDWLNGKEYKCKV |
| mutations | SNKALPAPIEKTISKAKGQPREPQVYTLPPSRDELTKNQVSLWCLVKG |
| | FYPSDIAVEWESYGTEWVNYKTTPPVLDSDGSFFLYSKLTVTKEEWQ |
| | QGFVFSCSVMHEALHNHYTQKSLSLSPGK (SEQ ID NO: 2294) |
| Clone CH3C.35.23.3 | APEAAGGPSVFLFPPKPKDTLYITREPEVTCVVVDVSHEDPEVKFNWY |
| with knob, LALA, | VDGVEVHNAKTKPREEQYNSTYRVVSVLTVLHQDWLNGKEYKCKV |
| and YTE mutations | SNKALPAPIEKTISKAKGQPREPQVYTLPPSRDELTKNQVSLWCLVKG |
| | FYPSDIAVEWESYGTEWVNYKTTPPVLDSDGSFFLYSKLTVTKEEWQ |
| | QGFVFSCSVMHEALHNHYTQKSLSLSPGK (SEQ ID NO: 2295) |
| Clone CH3C.35.23.3 | APEAAGGPSVFLFPPKPKDTLYITREPEVTCVVVDVSHEDPEVKFNWY |
| with knob, LALAPG, | VDGVEVHNAKTKPREEQYNSTYRVVSVLTVLHQDWLNGKEYKCKV |
| and YTE mutations | SNKALGAPIEKTISKAKGQPREPQVYTLPPSRDELTKNQVSLWCLVKG |
| | FYPSDIAVEWESYGTEWVNYKTTPPVLDSDGSFFLYSKLTVTKEEWQ |
| | QGFVFSCSVMHEALHNHYTQKSLSLSPGK (SEQ ID NO: 2296) |
| Clone CH3C.35.23.3 | APELLGGPSVFLFPPKPKDTLMISRTPEVTCVVVDVSHEDPEVKFNWY |
| with hole mutations | VDGVEVHNAKTKPREEQYNSTYRVVSVLTVLHQDWLNGKEYKCKV |
| | SNKALPAPIEKTISKAKGQPREPQVYTLPPSRDELTKNQVSLSCAVKGF |
| | YPSDIAVEWESYGTEWVNYKTTPPVLDSDGSFFLVSKLTVTKEEWQQ |
| | GFVFSCSVMHEALHNHYTQKSLSLSPGK (SEQ ID NO: 2297) |
| Clone CH3C.35.23.3 | APEAAGGPSVFLFPPKPKDTLMISRTPEVTCVVVDVSHEDPEVKFNWY |
| with hole and LALA | VDGVEVHNAKTKPREEQYNSTYRVVSVLTVLHQDWLNGKEYKCKV |
| mutations | SNKALPAPIEKTISKAKGQPREPQVYTLPPSRDELTKNQVSLSCAVKGF |
| | YPSDIAVEWESYGTEWVNYKTTPPVLDSDGSFFLVSKLTVTKEEWQQ |
| | GFVFSCSVMHEALHNHYTQKSLSLSPGK (SEQ ID NO: 2298) |
| Clone CH3C.35.23.3 | APEAAGGPSVFLFPPKPKDTLMISRTPEVTCVVVDVSHEDPEVKFNWY |
| with hole and | VDGVEVHNAKTKPREEQYNSTYRVVSVLTVLHQDWLNGKEYKCKV |
| LALAPG mutations | SNKALGAPIEKTISKAKGQPREPQVYTLPPSRDELTKNQVSLSCAVKG |
| | FYPSDIAVEWESYGTEWVNYKTTPPVLDSDGSFFLVSKLTVTKEEWQ |
| | QGFVFSCSVMHEALHNHYTQKSLSLSPGK (SEQ ID NO: 2299) |
| Clone CH3C.35.23.3 | APELLGGPSVFLFPPKPKDTLYITREPEVTCVVVDVSHEDPEVKFNWY |
| with hole and YTE | VDGVEVHNAKTKPREEQYNSTYRVVSVLTVLHQDWLNGKEYKCKV |
| mutations | SNKALPAPIEKTISKAKGQPREPQVYTLPPSRDELTKNQVSLSCAVKGF |
| | YPSDIAVEWESYGTEWVNYKTTPPVLDSDGSFFLVSKLTVTKEEWQQ |
| | GFVFSCSVMHEALHNHYTQKSLSLSPGK (SEQ ID NO: 2300) |
| Clone CH3C.35.23.3 | APEAAGGPSVFLFPPKPKDTLYITREPEVTCVVVDVSHEDPEVKFNWY |
| with hole. LALA, and | VDGVEVHNAKTKPREEQYNSTYRVVSVLTVLHQDWLNGKEYKCKV |
| YTE mutations | SNKALPAPIEKTISKAKGQPREPQVYTLPPSRDELTKNQVSLSCAVKGF |
| | YPSDIAVEWESYGTEWVNYKTTPPVLDSDGSFFLVSKLTVTKEEWQQ |
| | GFVFSCSVMHEALHNHYTQKSLSLSPGK (SEQ ID NO: 2301) |
| Clone CH3C.35.23.3 | APEAAGGPSVFLFPPKPKDTLYITREPEVTCVVVDVSHEDPEVKFNWY |
| with hole, LALAPG, | VDGVEVHNAKTKPREEQYNSTYRVVSVLTVLHQDWLNGKEYKCKV |
| and YTE mutations | SNKALGAPIEKTISKAKGQPREPQVYTLPPSRDELTKNQVSLSCAVKG |
| | FYPSDIAVEWESYGTEWVNYKTTPPVLDSDGSFFLVSKLTVTKEEWQ |
| | QGFVFSCSVMHEALHNHYTQKSLSLSPGK (SEQ ID NO: 2302) |
| Clone CH3C.35.23.4 | APELLGGPSVFLFPPKPKDTLMISRTPEVTCVVVDVSHEDPEVKFNWY |
| with knob mutation | VDGVEVHNAKTKPREEQYNSTYRVVSVLTVLHQDWLNGKEYKCKV |
| | SNKALPAPIEKTISKAKGQPREPQVYTLPPSRDELTKNQVSLWCLVKG |
| | FYPSDIAVEWESYGTEWSNYKTTPPVLDSDGSFFLYSKLTVSKEEWQQ |
| | GFVFSCSVMHEALHNHYTQKSLSLSPGK (SEQ ID NO: 2303) |
| Clone CH3C.35.23.4 | APEAAGGPSVFLFPPKPKDTLMISRTPEVTCVVVDVSHEDPEVKFNWY |
| with knob and LALA | VDGVEVHNAKTKPREEQYNSTYRVVSVLTVLHQDWLNGKEYKCKV |
| mutations | SNKALPAPIEKTISKAKGQPREPQVYTLPPSRDELTKNQVSLWCLVKG |
| | FYPSDIAVEWESYGTEWSNYKTTPPVLDSDGSFFLYSKLTVSKEEWQQ |
| | GFVFSCSVMHEALHNHYTQKSLSLSPGK (SEQ ID NO: 2304) |
| Clone CH3C.35.23.4 | APEAAGGPSVFLFPPKPKDTLMISRTPEVTCVVVDVSHEDPEVKFNWY |
| with knob and | VDGVEVHNAKTKPREEQYNSTYRVVSVLTVLHQDWLNGKEYKCKV |
| LALAPG mutations | SNKALGAPIEKTISKAKGQPREPQVYTLPPSRDELTKNQVSLWCLVKG |
| | FYPSDIAVEWESYGTEWSNYKTTPPVLDSDGSFFLYSKLTVSKEEWQQ |
| | GFVFSCSVMHEALHNHYTQKSLSLSPGK (SEQ ID NO: 2305) |
| Clone CH3C.35.23.4 | APELLGGPSVFLFPPKPKDTLYITREPEVTCVVVDVSHEDPEVKFNWY |
| with knob and YTE | VDGVEVHNAKTKPREEQYNSTYRVVSVLTVLHQDWLNGKEYKCKV |
| mutations | SNKALPAPIEKTISKAKGQPREPQVYTLPPSRDELTKNQVSLWCLVKG |
| | FYPSDIAVEWESYGTEWSNYKTTPPVLDSDGSFFLYSKLTVSKEEWQQ |
| | GFVFSCSVMHEALHNHYTQKSLSLSPGK (SEQ ID NO: 2306) |
| Clone CH3C.35.23.4 | APEAAGGPSVFLFPPKPKDTLYITREPEVTCVVVDVSHEDPEVKFNWY |
| with knob, LALA, | VDGVEVHNAKTKPREEQYNSTYRVVSVLTVLHQDWLNGKEYKCKV |
| and YTE mutations | SNKALPAPIEKTISKAKGQPREPQVYTLPPSRDELTKNQVSLWCLVKG |
| | FYPSDIAVEWESYGTEWSNYKTTPPVLDSDGSFFLYSKLTVSKEEWQQ |
| | GFVFSCSVMHEALHNHYTQKSLSLSPGK (SEQ ID NO: 2307) |
| Clone CH3C.35.23.4 | APEAAGGPSVFLFPPKPKDTLYITREPEVTCVVVDVSHEDPEVKFNWY |
| with knob, LALAPG, | VDGVEVHNAKTKPREEQYNSTYRVVSVLTVLHQDWLNGKEYKCKV |
| and YTE mutations | SNKALGAPIEKTISKAKGQPREPQVYTLPPSRDELTKNQVSLWCLVKG |
| | FYPSDIAVEWESYGTEWSNYKTTPPVLDSDGSFFLYSKLTVSKEEWQQ |
| | GFVFSCSVMHEALHNHYTQKSLSLSPGK (SEQ ID NO: 2308) |
| Clone CH3C.35.23.4 | APELLGGPSVFLFPPKPKDTLMISRTPEVTCVVVDVSHEDPEVKFNWY |
| with hole mutations | VDGVEVHNAKTKPREEQYNSTYRVVSVLTVLHQDWLNGKEYKCKV |
| | SNKALPAPIEKTISKAKGQPREPQVYTLPPSRDELTKNQVSLSCAVKGF |
| | YPSDIAVEWESYGTEWSNYKTTPPVLDSDGSFFLVSKLTVSKEEWQQ |
| | GFVFSCSVMHEALHNHYTQKSLSLSPGK (SEQ ID NO: 2309) |
| Clone CH3C.35.23.4 | APEAAGGPSVFLFPPKPKDTLMISRTPEVTCVVVDVSHEDPEVKFNWY |
| with hole and LALA | VDGVEVHNAKTKPREEQYNSTYRVVSVLTVLHQDWLNGKEYKCKV |
| mutations | SNKALPAPIEKTISKAKGQPREPQVYTLPPSRDELTKNQVSLSCAVKGF |
| | YPSDIAVEWESYGTEWSNYKTTPPVLDSDGSFFLVSKLTVSKEEWQQ |
| | GFVFSCSVMHEALHNHYTQKSLSLSPGK (SEQ ID NO: 2310) |
| Clone CH3C.35.23.4 | APEAAGGPSVFLFPPKPKDTLMISRTPEVTCVVVDVSHEDPEVKFNWY |
| with hole and | VDGVEVHNAKTKPREEQYNSTYRVVSVLTVLHQDWLNGKEYKCKV |
| LALAPG mutations | SNKALGAPIEKTISKAKGQPREPQVYTLPPSRDELTKNQVSLSCAVKG |
| | FYPSDIAVEWESYGTEWSNYKTTPPVLDSDGSFFLVSKLTVSKEEWQQ |
| | GFVFSCSVMHEALHNHYTQKSLSLSPGK (SEQ ID NO: 2311) |
| Clone CH3C.35.23.4 | APELLGGPSVFLFPPKPKDTLYITREPEVTCVVVDVSHEDPEVKFNWY |
| with hole and YTE | VDGVEVHNAKTKPREEQYNSTYRVVSVLTVLHQDWLNGKEYKCKV |
| mutations | SNKALPAPIEKTISKAKGQPREPQVYTLPPSRDELTKNQVSLSCAVKGF |
| | YPSDIAVEWESYGTEWSNYKTTPPVLDSDGSFFLVSKLTVSKEEWQQ |
| | GFVFSCSVMHEALHNHYTQKSLSLSPGK (SEQ ID NO: 2312) |
| Clone CH3C.35.23.4 | APEAAGGPSVFLFPPKPKDTLYITREPEVTCVVVDVSHEDPEVKFNWY |
| with hole. LALA, and | VDGVEVHNAKTKPREEQYNSTYRVVSVLTVLHQDWLNGKEYKCKV |
| YTE mutations | SNKALPAPIEKTISKAKGQPREPQVYTLPPSRDELTKNQVSLSCAVKGF |
| | YPSDIAVEWESYGTEWSNYKTTPPVLDSDGSFFLVSKLTVSKEEWQQ |
| | GFVFSCSVMHEALHNHYTQKSLSLSPGK (SEQ ID NO: 2313) |
| Clone CH3C.35.23.4 | APEAAGGPSVFLFPPKPKDTLYITREPEVTCVVVDVSHEDPEVKFNWY |
| with hole, LALAPG, | VDGVEVHNAKTKPREEQYNSTYRVVSVLTVLHQDWLNGKEYKCKV |
| and YTE mutations | SNKALGAPIEKTISKAKGQPREPQVYTLPPSRDELTKNQVSLSCAVKG |
| | FYPSDIAVEWESYGTEWSNYKTTPPVLDSDGSFFLVSKLTVSKEEWQQ |
| | GFVFSCSVMHEALHNHYTQKSLSLSPGK (SEQ ID NO: 2314) |
| Clone CH3C.35.21.17.2 | APELLGGPSVFLFPPKPKDTLMISRTPEVTCVVVDVSHEDPEVKFNWY |
| with knob | VDGVEVHNAKTKPREEQYNSTYRVVSVLTVLHQDWLNGKEYKCKV |
| mutation | SNKALPAPIEKTISKAKGQPREPQVYTLPPSRDELTKNQVSLWCLVKG |
| | FYPSDIAVLWESYGTEWASYKTTPPVLDSDGSFFLYSKLTVTKEEWQ |
| | QGFVFSCSVMHEALHNHYTQKSLSLSPGK (SEQ ID NO: 2315) |
| Clone CH3C.35.21.17.2 | APEAAGGPSVFLFPPKPKDTLMISRTPEVTCVVVDVSHEDPEVKFNWY |
| with knob and | VDGVEVHNAKTKPREEQYNSTYRVVSVLTVLHQDWLNGKEYKCKV |
| LALA mutations | SNKALPAPIEKTISKAKGQPREPQVYTLPPSRDELTKNQVSLWCLVKG |
| | FYPSDIAVLWESYGTEWASYKTTPPVLDSDGSFFLYSKLTVTKEEWQ |
| | QGFVFSCSVMHEALHNHYTQKSLSLSPGK (SEQ ID NO: 2316) |
| Clone CH3C.35.21.17.2 | APEAAGGPSVFLFPPKPKDTLMISRTPEVTCVVVDVSHEDPEVKFNWY |
| with knob and | VDGVEVHNAKTKPREEQYNSTYRVVSVLTVLHQDWLNGKEYKCKV |
| LALAPG mutations | SNKALGAPIEKTISKAKGQPREPQVYTLPPSRDELTKNQVSLWCLVKG |
| | FYPSDIAVLWESYGTEWASYKTTPPVLDSDGSFFLYSKLTVTKEEWQ |
| | QGFVFSCSVMHEALHNHYTQKSLSLSPGK (SEQ ID NO: 2317) |
| Clone CH3C.35.21.17.2 | APELLGGPSVFLFPPKPKDTLYITREPEVTCVVVDVSHEDPEVKFNWY |
| with knob and | VDGVEVHNAKTKPREEQYNSTYRVVSVLTVLHQDWLNGKEYKCKV |
| YTE mutations | SNKALPAPIEKTISKAKGQPREPQVYTLPPSRDELTKNQVSLWCLVKG |
| | FYPSDIAVLWESYGTEWASYKTTPPVLDSDGSFFLYSKLTVTKEEWQ |
| | QGFVFSCSVMHEALHNHYTQKSLSLSPGK (SEQ ID NO: 2318) |
| Clone CH3C.35.21.17.2 | APEAAGGPSVFLFPPKPKDTLYITREPEVTCVVVDVSHEDPEVKFNWY |
| with knob, | VDGVEVHNAKTKPREEQYNSTYRVVSVLTVLHQDWLNGKEYKCKV |
| LALA, and YTE | SNKALPAPIEKTISKAKGQPREPQVYTLPPSRDELTKNQVSLWCLVKG |
| mutations | FYPSDIAVLWESYGTEWASYKTTPPVLDSDGSFFLYSKLTVTKEEWQ |
| | QGFVFSCSVMHEALHNHYTQKSLSLSPGK (SEQ ID NO: 2319) |
| Clone CH3C.35.21.17.2 | APEAAGGPSVFLFPPKPKDTLYITREPEVTCVVVDVSHEDPEVKFNWY |
| with knob, | VDGVEVHNAKTKPREEQYNSTYRVVSVLTVLHQDWLNGKEYKCKV |
| LALAPG, and YTE | SNKALGAPIEKTISKAKGQPREPQVYTLPPSRDELTKNQVSLWCLVKG |
| mutations | FYPSDIAVLWESYGTEWASYKTTPPVLDSDGSFFLYSKLTVTKEEWQ |
| | QGFVFSCSVMHEALHNHYTQKSLSLSPGK (SEQ ID NO: 2320) |
| Clone CH3C.35.21.17.2 | APELLGGPSVFLFPPKPKDTLMISRTPEVTCVVVDVSHEDPEVKFNWY |
| with hole | VDGVEVHNAKTKPREEQYNSTYRVVSVLTVLHQDWLNGKEYKCKV |
| mutations | SNKALPAPIEKTISKAKGQPREPQVYTLPPSRDELTKNQVSLSCAVKGF |
| | YPSDIAVLWESYGTEWASYKTTPPVLDSDGSFFLVSKLTVTKEEWQQ |
| | GFVFSCSVMHEALHNHYTQKSLSLSPGK (SEQ ID NO: 2321) |
| Clone CH3C.35.21.17.2 | APEAAGGPSVFLFPPKPKDTLMISRTPEVTCVVVDVSHEDPEVKFNWY |
| with hole and | VDGVEVHNAKTKPREEQYNSTYRVVSVLTVLHQDWLNGKEYKCKV |
| LALA mutations | SNKALPAPIEKTISKAKGQPREPQVYTLPPSRDELTKNQVSLSCAVKGF |
| | YPSDIAVLWESYGTEWASYKTTPPVLDSDGSFFLVSKLTVTKEEWQQ |
| | GFVFSCSVMHEALHNHYTQKSLSLSPGK (SEQ ID NO: 2322) |
| Clone CH3C.35.21.17.2 | APEAAGGPSVFLFPPKPKDTLMISRTPEVTCVVVDVSHEDPEVKFNWY |
| with hole and | VDGVEVHNAKTKPREEQYNSTYRVVSVLTVLHQDWLNGKEYKCKV |
| LALAPG mutations | SNKALGAPIEKTISKAKGQPREPQVYTLPPSRDELTKNQVSLSCAVKG |
| | FYPSDIAVLWESYGTEWASYKTTPPVLDSDGSFFLVSKLTVTKEEWQ |
| | QGFVFSCSVMHEALHNHYTQKSLSLSPGK (SEQ ID NO: 2323) |
| Clone CH3C.35.21.17.2 | APELLGGPSVFLFPPKPKDTLYITREPEVTCVVVDVSHEDPEVKFNWY |
| with hole and | VDGVEVHNAKTKPREEQYNSTYRVVSVLTVLHQDWLNGKEYKCKV |
| YTE mutations | SNKALPAPIEKTISKAKGQPREPQVYTLPPSRDELTKNQVSLSCAVKGF |
| | YPSDIAVLWESYGTEWASYKTTPPVLDSDGSFFLVSKLTVTKEEWQQ |
| | GFVFSCSVMHEALHNHYTQKSLSLSPGK (SEQ ID NO: 2324) |
| Clone CH3C.35.21.17.2 | APEAAGGPSVFLFPPKPKDTLYITREPEVTCVVVDVSHEDPEVKFNWY |
| with hole, | VDGVEVHNAKTKPREEQYNSTYRVVSVLTVLHQDWLNGKEYKCKV |
| LALA, and YTE | SNKALPAPIEKTISKAKGQPREPQVYTLPPSRDELTKNQVSLSCAVKGF |
| mutations | YPSDIAVLWESYGTEWASYKTTPPVLDSDGSFFLVSKLTVTKEEWQQ |
| | GFVFSCSVMHEALHNHYTQKSLSLSPGK (SEQ ID NO: 2325) |
| Clone CH3C.35.21.17.2 | APEAAGGPSVFLFPPKPKDTLYITREPEVTCVVVDVSHEDPEVKFNWY |
| with hole, | VDGVEVHNAKTKPREEQYNSTYRVVSVLTVLHQDWLNGKEYKCKV |
| LALAPG, and YTE | SNKALGAPIEKTISKAKGQPREPQVYTLPPSRDELTKNQVSLSCAVKG |
| mutations | FYPSDIAVLWESYGTEWASYKTTPPVLDSDGSFFLVSKLTVTKEEWQ |
| | QGFVFSCSVMHEALHNHYTQKSLSLSPGK (SEQ ID NO: 2326) |
| Clone CH3C.35.23 | APELLGGPSVFLFPPKPKDTLMISRTPEVTCVVVDVSHEDPEVKFNWY |
| with knob mutation | VDGVEVHNAKTKPREEQYNSTYRVVSVLTVLHQDWLNGKEYKCKV |
| | SNKALPAPIEKTISKAKGQPREPQVYTLPPSRDELTKNQVSLWCLVKG |
| | FYPSDIAVEWESYGTEWSNYKTTPPVLDSDGSFFLYSKLTVTKEEWQ |
| | QGFVFSCSVMHEALHNHYTQKSLSLSPGK (SEQ ID NO: 2327) |
| Clone CH3C.35.23 | APEAAGGPSVFLFPPKPKDTLMISRTPEVTCVVVDVSHEDPEVKFNWY |
| with knob and LALA | VDGVEVHNAKTKPREEQYNSTYRVVSVLTVLHQDWLNGKEYKCKV |
| mutations | SNKALPAPIEKTISKAKGQPREPQVYTLPPSRDELTKNQVSLWCLVKG |
| | FYPSDIAVEWESYGTEWSNYKTTPPVLDSDGSFFLYSKLTVTKEEWQ |
| | QGFVFSCSVMHEALHNHYTQKSLSLSPGK (SEQ ID NO: 2328) |
| Clone CH3C.35.23 | APEAAGGPSVFLFPPKPKDTLMISRTPEVTCVVVDVSHEDPEVKFNWY |
| with knob and | VDGVEVHNAKTKPREEQYNSTYRVVSVLTVLHQDWLNGKEYKCKV |
| LALAPG mutations | SNKALGAPIEKTISKAKGQPREPQVYTLPPSRDELTKNQVSLWCLVKG |
| | FYPSDIAVEWESYGTEWSNYKTTPPVLDSDGSFFLYSKLTVTKEEWQ |
| | QGFVFSCSVMHEALHNHYTQKSLSLSPGK (SEQ ID NO: 2329) |
| Clone CH3C.35.23 | APELLGGPSVFLFPPKPKDTLYITREPEVTCVVVDVSHEDPEVKFNWY |
| with knob and YTE | VDGVEVHNAKTKPREEQYNSTYRVVSVLTVLHQDWLNGKEYKCKV |
| mutations | SNKALPAPIEKTISKAKGQPREPQVYTLPPSRDELTKNQVSLWCLVKG |
| | FYPSDIAVEWESYGTEWSNYKTTPPVLDSDGSFFLYSKLTVTKEEWQ |
| | QGFVFSCSVMHEALHNHYTQKSLSLSPGK (SEQ ID NO: 2330) |
| Clone CH3C.35.23 | APEAAGGPSVFLFPPKPKDTLYITREPEVTCVVVDVSHEDPEVKFNWY |
| with knob, LALA, | VDGVEVHNAKTKPREEQYNSTYRVVSVLTVLHQDWLNGKEYKCKV |
| and YTE mutations | SNKALPAPIEKTISKAKGQPREPQVYTLPPSRDELTKNQVSLWCLVKG |
| | FYPSDIAVEWESYGTEWSNYKTTPPVLDSDGSFFLYSKLTVTKEEWQ |
| | QGFVFSCSVMHEALHNHYTQKSLSLSPGK (SEQ ID NO: 2331) |
| Clone CH3C.35.23 | APEAAGGPSVFLFPPKPKDTLYITREPEVTCVVVDVSHEDPEVKFNWY |
| with knob, LALAPG, | VDGVEVHNAKTKPREEQYNSTYRVVSVLTVLHQDWLNGKEYKCKV |
| and YTE mutations | SNKALGAPIEKTISKAKGQPREPQVYTLPPSRDELTKNQVSLWCLVKG |
| | FYPSDIAVEWESYGTEWSNYKTTPPVLDSDGSFFLYSKLTVTKEEWQ |
| | QGFVFSCSVMHEALHNHYTQKSLSLSPGK (SEQ ID NO: 2332) |
| Clone CH3C.35.23 | APELLGGPSVFLFPPKPKDTLMISRTPEVTCVVVDVSHEDPEVKFNWY |
| with hole mutations | VDGVEVHNAKTKPREEQYNSTYRVVSVLTVLHQDWLNGKEYKCKV |
| | SNKALPAPIEKTISKAKGQPREPQVYTLPPSRDELTKNQVSLSCAVKGF |
| | YPSDIAVEWESYGTEWSNYKTTPPVLDSDGSFFLVSKLTVTKEEWQQ |
| | GFVFSCSVMHEALHNHYTQKSLSLSPGK (SEQ ID NO: 2333) |
| Clone CH3C.35.23 | APEAAGGPSVFLFPPKPKDTLMISRTPEVTCVVVDVSHEDPEVKFNWY |
| with hole and LALA | VDGVEVHNAKTKPREEQYNSTYRVVSVLTVLHQDWLNGKEYKCKV |
| mutations | SNKALPAPIEKTISKAKGQPREPQVYTLPPSRDELTKNQVSLSCAVKGF |
| | YPSDIAVEWESYGTEWSNYKTTPPVLDSDGSFFLVSKLTVTKEEWQQ |
| | GFVFSCSVMHEALHNHYTQKSLSLSPGK (SEQ ID NO: 2334) |
| Clone CH3C.35.23 | APEAAGGPSVFLFPPKPKDTLMISRTPEVTCVVVDVSHEDPEVKFNWY |
| with hole and | VDGVEVHNAKTKPREEQYNSTYRVVSVLTVLHQDWLNGKEYKCKV |
| LALAPG mutations | SNKALGAPIEKTISKAKGQPREPQVYTLPPSRDELTKNQVSLSCAVKG |
| | FYPSDIAVEWESYGTEWSNYKTTPPVLDSDGSFFLVSKLTVTKEEWQ |
| | QGFVFSCSVMHEALHNHYTQKSLSLSPGK (SEQ ID NO: 2335) |
| Clone CH3C.35.23 | APELLGGPSVFLFPPKPKDTLYITREPEVTCVVVDVSHEDPEVKFNWY |
| with hole and YTE | VDGVEVHNAKTKPREEQYNSTYRVVSVLTVLHQDWLNGKEYKCKV |
| mutations | SNKALPAPIEKTISKAKGQPREPQVYTLPPSRDELTKNQVSLSCAVKGF |
| | YPSDIAVEWESYGTEWSNYKTTPPVLDSDGSFFLVSKLTVTKEEWQQ |
| | GFVFSCSVMHEALHNHYTQKSLSLSPGK (SEQ ID NO: 2336) |
| Clone CH3C.35.23 | APEAAGGPSVFLFPPKPKDTLYITREPEVTCVVVDVSHEDPEVKFNWY |
| with hole. LALA, and | VDGVEVHNAKTKPREEQYNSTYRVVSVLTVLHQDWLNGKEYKCKV |
| YTE mutations | SNKALPAPIEKTISKAKGQPREPQVYTLPPSRDELTKNQVSLSCAVKGF |
| | YPSDIAVEWESYGTEWSNYKTTPPVLDSDGSFFLVSKLTVTKEEWQQ |
| | GFVFSCSVMHEALHNHYTQKSLSLSPGK (SEQ ID NO: 2337) |
| Clone CH3C.35.23 | APEAAGGPSVFLFPPKPKDTLYITREPEVTCVVVDVSHEDPEVKFNWY |
| with hole, LALAPG, | VDGVEVHNAKTKPREEQYNSTYRVVSVLTVLHQDWLNGKEYKCKV |
| and YTE mutations | SNKALGAPIEKTISKAKGQPREPQVYTLPPSRDELTKNQVSLSCAVKG |
| | FYPSDIAVEWESYGTEWSNYKTTPPVLDSDGSFFLVSKLTVTKEEWQ |
| | QGFVFSCSVMHEALHNHYTQKSLSLSPGK (SEQ ID NO: 2338) |
| CH3C motif | YxTEWSS (SEQ ID NO: 2339) |
| CH3C motif | TxxExxxxF (SEQ ID NO: 2340) |
| mulgGI 3′ VH PCR | GGACAGGGATCCAGAGTTCC (SEQ ID NO: 2341) |
| primer | |
| mu3/4G2 3′ VH PCR | AGCTGGGAAGGTGTGCACAC (SEQ ID NO: 2342) |
| primer | |
| mu3/4G3 3′ VH PCR | CAGGGGCCAGTGGATAGAC (SEQ ID NO: 2343) |
| primer | |
| muCkappa.1 3′ VL | GACATTGATGTCTTTGGGGT (SEQ ID NO: 2344) |
| PCR primer | |
| muCkappa.2 3′ VL | TTCACTGCCATCAATCTTCC (SEQ ID NO: 2345) |
| PCR primer | |
| 7B10.A2 VH amino | EVQLQQSGPELVKPGASVKMSCKASGYTFTDYNMHWVKQSHGKSLE |
| acid sequence | WIGYINPNNGGTTYNQKFKGKATLTVNKSSSTAYMELRSLTSEDSAV |
| | YYCATYNNHYFDSWGQGTTLTVSS (SEQ ID NO: 2346) |
| 7B10.A2 CDR-H1 | GYTFTDYNMH (SEQ ID NO: 2347) |
| 7B10.A2 CDR-H2 | YINPNNGGTTYNQKFKG (SEQ ID NO: 2348) |
| 7B10.A2 CDR-H3 | ATYNNHYFDS (SEQ ID NO: 2349) |
| 7B10.A2 VL amino | DIQMTQTTSSLSASLGDRVTISCSASQGISNYLNWYQQKPDGTVKLLI |
| acid sequence | YYTSNLHSGVPSRFSGSGSGTDYSLTISNLEPEDIATYYCQQYSNLPYT |
| | FGGGTKLEIK (SEQ ID NO: 2350) |
| 7B10.A2 CDR-L1 | SASQGISNYLN (SEQ ID NO: 2351) |
| 7B10.A2 CDR-L2 | YTSNLHS (SEQ ID NO: 2352) |
| 7B10.A2 CDR-L3 | QQYSNLPYT (SEQ ID NO: 2353) |
| 51D4 VH amino acid | QVHLQQSGPEVVRPGVSVKISCKGSGYTFTDYGMHWVKQSHAKSLE |
| sequence | WIGVISTYNGNTSYNQKYKGKATVTVDKPSSTAYMELVRLTSEDSAI |
| | YYCARDFGYVPFDYWGQGTTLTVSS (SEQ ID NO: 2354) |
| 51D4 CDR-H1 | GYTFTDYGMH (SEQ ID NO: 2355) |
| 51D4 CDR-H2 | VISTYNGNTSYNQKYKG (SEQ ID NO: 2356) |
| 51D4 CDR-H3 | ARDFGYVPFDY (SEQ ID NO: 2357) |
| 51D4 VL amino acid | DVVMTQTPLTLSVTIGQPASISCKSSQSLLDSDGKTYLNWLLQRP |
| sequence | GQSPKRLIYLVSYLDSGVPDRFTGSGSGTDFTLKISRVEADDLGV |
| | YYCWQGTHFPYTFGGGTKLEIK (SEQ ID NO: 2358) |
| 51D4 CDR-L2 | LVSYLDS (SEQ ID NO: 2359) |
| CDR-H1 consensus | GX2X3X4X5X6X7X8X9X10X11, wherein X2 is Y or F; X3 is T, N, or S; X4 is F, |
| sequence | L, or I; X5 is T, S, or K; X6 is D, S, or E; X7 is D or absent; X8 is H, |
| | Y, or T; X9 is A, N, G, V, W, T, or Y; X10 is M, I, or W; and Xis H, Q, or N |
| | (SEQ ID NO: 2360) |
| CDR-H1 consensus | GYX3X4X5X6X7X8X9X10X11, wherein X3 is T or S; X4 is F, L, or I; X5 is |
| sequence | Tor S; X6 is D, S, or E; X7 is D or absent; X8 is H or Y; X9 is A, N, G, V, |
| | W, T, or A; X10 is M, I, or W; and X11 is H, Q, or N (SEQ ID NO: 2361) |
| CDR-H1 consensus | GX2X3X4X5X6X8X9X10X11, wherein X is Y or F; X3 is T or N; X4 is F, L, |
| sequence | or I; X is T, S, or K; X6 is D, S, or E; X8 is H, Y, or T; X is A, N, G, V, |
| | W, T, Y, or A; Xi is M or I; and X is H or Q (SEQ ID NO: 2362) |
| CDR-H1 consensus | GYTX4X5X6X8X9X10X11, wherein X4 is F or L; X is T or S; X6 is D, S, or |
| sequence | E; X8 is H, Y; X9 is A, N, G, V, W, T; X10 is M or I; and X11 is H or Q |
| | (SEQ ID NO: 2363) |
| CDR-H2 consensus | X1X2X3X4X5X6X7X8X9X10YX12X13X14X15X16X17, wherein X1 is D, V, Y, R, |
| sequence | G, or T; X2 is I, S, or V; X3 is L, S, N, D, I, or Y; X4 is P, T, or absent; |
| | X5 is S, Y, N, T, A, G, or F; X6 is I, S, N, T, or D; X7 is G or D; X8 is G, |
| | D, N, R, or S; X9 is R, T, or A; X10 is I, G, S, K, T, N, or R; X12 is G, N, |
| | D, or T; X13 is V, Q, E, or P; X14 is K or S; X15 is F, Y or L; X16 is K, R, |
| | Q, or is absent; and X17 is G, T, D, S, or is absent (SEQ ID NO: 2364) |
| CDR-H2 consensus | X1X2X3X4X5X6X7X8X9X10YX12X13X14X15X16X17, wherein Xi is V, Y, R, G, |
| sequence | or T; X2 is I, S, or V; X3 is S, N, D, I, or Y; X4 is P, T, or absent; X5 |
| | is Y, N, T, A, G, or F; X6 is S, N, T, or D; X7 is G or D; X8 is G, D, N, R, |
| | or S; X9 is T, or A; X10 is I, G, S, K, T, N, or R; X12 is N, D, or T; X13 is |
| | Q, E, or P; X14 is K or 5; X15 is F, Y or L; X16 is K, R, or Q; and Xi is G, T, |
| | D, or S (SEQ ID NO: 2365) |
| CDR-H2 consensus | X1X2X3X4X5X6X7X8X9X10YX12X13KX15X16X17, wherein Xi is V, Y, R, G, |
| sequence | or T; X2 is I, S, or V; X3 is S, N, D, I, or Y ; X4 is P or T; X5 is Y, N, T, |
| | A, or G; X6 is S, N, T, or D; X7 is G or D; X8 is G, D, or N; X9 is T, or A; |
| | X10 is G, S, K, T, N, or R; X12 is N, D, or T; X13 is Q, E, or P; X15 is F or |
| | Y; X16 is K, R, or Q; and X17 is G, T, or D (SEQ ID NO: 2366) |
| CDR-H3 consensus | ARX3X4X5X6X7X8X9X1OYAX13DY, wherein X3 is G or N; X4 is D or G; |
| sequence | X5 is D or I; X6 is S or T; X7 is Y or T; X8 is R or A; X9 is R or G; X10 is G |
| | or Y; and X13 is L or M (SEQ ID NO: 2367) |
| CDR-L1 consensus | X1SSX4SLX7X8X9X10X11X12X13X14X15LX17, wherein X1 is R or K; |
| sequence | X4 is Q or K; X7 is V or L; X8 is H, D, or Y; X9 is I, N, or S; X10 is S or |
| | absent; X11 is D or N; X12 is G or Q; X13 is N, I, or K; X14 is T or S; X15 is |
| | Y or F; and X17 is Q, H, Y, N, or A (SEQ ID NO: 2368) |
| CDR-L1 consensus | X1ASX4X5IX7X8X9LX11, wherein X1 is R, K, or S; X4 is E or Q; X5 is N, |
| sequence | D, or G; X7 is Y or S; X8 is S or N; X9 is N, R, or Y; and X11 is A or N |
| | (SEQ ID NO: 2369) |
| CDR-L2 consensus | X1X2SX4X5X6S, wherein Xi is K, Q, Y, V, or L; X2 is V, M, or T; X4 is N, |
| sequence | K, or Y; X5 is R or L; and X6 is F, A, H, or D (SEQ ID NO: 2370) |
| CDR-L3 consensus | X1X2X3X4X5X6X7X8T, wherein Xi is S, W, or Q; X2 is Q or H; X3 is S, T, |
| sequence | G, Y, or F; X4 is T, F, W, S; X5 is H, S, G, or N; X6 is V, A, F, Y, T, or L; |
| | X7 is P, T, or L; and X8 is Y, F, P, or W (SEQ ID NO: 2371) |
| CDR-L3 consensus | QX2X3X4X5X6PX8T, wherein X2 is Q or H; X3 is Y or F; X4 is F, W, or S; |
| sequence | X5 is S, G, or N; X6 is Y, T, or L; and X8 is P, Y, or W (SEQ ID NO: 2372) |
| Human TREM2 | SGAHNTTVFQGVAGQSLQVSCPYDSMKHWGRRKAWCRQLGEK |
| extracellular domain | GPCQRVVSTHNLWLLSFLRRWNGSTAITDDTLGGTLTITLRNLQP |
| (ECD) amino acid | HDAGLYQCQSLHGSEADTLRKVLVEVLADPLDHRDAGDLWFPG |
| sequence (without | ESESFEDAHVEHSISRSLLEGEIPFPPTS (SEQ ID NO: 2373) |
| signal peptide and | |
| His tag) | |
| Human TREM2 | DLWFPGESES (SEQ ID NO: 2374) |
| peptide | |
| Human TREM2 | DLWFPGESE (SEQ ID NO: 2375) |
| peptide 9-mer amino | |
| acid sequence | |
| Human TREM2 | DLWFP (SEQ ID NO: 2376) |
| peptide sequence | |
| (residues 140-144 of | |
| full-length TREM2) | |
| Clone CH3C.18.3.4-1 | APELLGGPSVFLFPPKPKDTLMISRTPEVTCVVVDVSHEDPEVKFNWY |
| (CH3C.3.4-1) | VDGVEVHNAKTKPREEQYNSTYRVVSVLTVLHQDWLNGKEYKCKV |
| | SNKALPAPIEKTISKAKGQPREPQVYTLPPSRDELTKNQVSLTCLVKGF |
| | YPSDIAVEWESWGFVWSTYKTTPPVLDSDGSFFLYSKLTVPKSNWQQ |
| | GFVFSCSVMHEALHNHYTQKSLSLSPGK (SEQ ID NO: 2377) |
| Clone CH3C.18.3.4- | APELLGGPSVFLFPPKPKDTLMISRTPEVTCVVVDVSHEDPEVKFNWY |
| 19 (CH3C.3.4-19) | VDGVEVHNAKTKPREEQYNSTYRVVSVLTVLHQDWLNGKEYKCKV |
| | SNKALPAPIEKTISKAKGQPREPQVYTLPPSRDELTKNQVSLTCLVKGF |
| | YPSDIAVEWESWGHVWSTYKTTPPVLDSDGSFFLYSKLTVPKSNWQQ |
| | GYVFSCSVMHEALHNHYTQKSLSLSPGK (SEQ ID NO: 2378) |
| Clone CH3C.18.3.2-3 | APELLGGPSVFLFPPKPKDTLMISRTPEVTCVVVDVSHEDPEVKFNWY |
| (CH3C.3.2-3) | VDGVEVHNAKTKPREEQYNSTYRVVSVLTVLHQDWLNGKEYKCKV |
| | SNKALPAPIEKTISKAKGQPREPQVYTLPPSRDELTKNQVSLTCLVKGF |
| | YPSDIAVEWESLGHVWVEQKTTPPVLDSDGSFFLYSKLTVPKSTWQQ |
| | GWVFSCSVMHEALHNHYTQKSLSLSPGK (SEQ ID NO: 2379) |
| Clone CH3C.18.3.2- | APELLGGPSVFLFPPKPKDTLMISRTPEVTCVVVDVSHEDPEVKFNWY |
| 14 (CH3C.3.2-14) | VDGVEVHNAKTKPREEQYNSTYRVVSVLTVLHQDWLNGKEYKCKV |
| | SNKALPAPIEKTISKAKGQPREPQVYTLPPSRDELTKNQVSLTCLVKGF |
| | YPSDIAVEWESLGHVWVGVKTTPPVLDSDGSFFLYSKLTVPKSTWQQ |
| | GWVFSCSVMHEALHNHYTQKSLSLSPGK (SEQ ID NO: 2380) |
| Clone CH3C.18.3.2- | APELLGGPSVFLFPPKPKDTLMISRTPEVTCVVVDVSHEDPEVKFNWY |
| 24 (CH3C.3.2-24) | VDGVEVHNAKTKPREEQYNSTYRVVSVLTVLHQDWLNGKEYKCKV |
| | SNKALPAPIEKTISKAKGQPREPQVYTLPPSRDELTKNQVSLTCLVKGF |
| | YPSDIAVEWESLGHVWVHTKTTPPVLDSDGSFFLYSKLTVPKSTWQQ |
| | GWVFSCSVMHEALHNHYTQKSLSLSPGK (SEQ ID NO: 2381) |
| Clone CH3C.18.3.4- | APELLGGPSVFLFPPKPKDTLMISRTPEVTCVVVDVSHEDPEVKFNWY |
| 26 (CH3C.3.4-26) | VDGVEVHNAKTKPREEQYNSTYRVVSVLTVLHQDWLNGKEYKCKV |
| | SNKALPAPIEKTISKAKGQPREPQVYTLPPSRDELTKNQVSLTCLVKGF |
| | YPSDIAVEWESWGTVWGTYKTTPPVLDSDGSFFLYSKLTVPKSNWQQ |
| | GYVFSCSVMHEALHNHYTQKSLSLSPGK (SEQ ID NO: 2382) |
| Clone CH3C.18.3.2- | APELLGGPSVFLFPPKPKDTLMISRTPEVTCVVVDVSHEDPEVKFNWY |
| 17 (CH3C.3.2-17) | VDGVEVHNAKTKPREEQYNSTYRVVSVLTVLHQDWLNGKEYKCKV |
| | SNKALPAPIEKTISKAKGQPREPQVYTLPPSRDELTKNQVSLTCLVKGF |
| | YPSDIAVEWESLGHVWVGTKTTPPVLDSDGSFFLYSKLTVPKSTWQQ |
| | GWVFSCSVMHEALHNHYTQKSLSLSPGK (SEQ ID NO: 2383) |
| Clone | APELLGGPSVFLFPPKPKDTLMISRTPEVTCVVVDVSHEDPEVKFNWY |
| CH3C.35.20.1.1 | VDGVEVHNAKTKPREEQYNSTYRVVSVLTVLHQDWLNGKEYKCKV |
| | SNKALPAPIEKTISKAKGQPREPQVYTLPPSRDELTKNQVSLTCLVKGF |
| | YPSDIAVEWESFGTEWSSYKTTPPVLDSDGSFFLYSKLTVSKEEWQQG |
| | FVFSCSVMHEALHNHYTQKSLSLSPGK (SEQ ID NO: 2384) |
| Clone | APELLGGPSVFLFPPKPKDTLMISRTPEVTCVVVDVSHEDPEVKFNWY |
| CH3C.35.23.2.1 | VDGVEVHNAKTKPREEQYNSTYRVVSVLTVLHQDWLNGKEYKCKV |
| | SNKALPAPIEKTISKAKGQPREPQVYTLPPSRDELTKNQVSLTCLVKGF |
| | YPSDIAVEWESYGTEWANYKTTPPVLDSDGSFFLYSKLTVSKSEWQQ |
| | GFVFSCSVMHEALHNHYTQKSLSLSPGK (SEQ ID NO: 2385) |
| Clone CH3C.35.23.1.1 | APELLGGPSVFLFPPKPKDTLMISRTPEVTCVVVDVSHEDPEVKFNWY |
| | VDGVEVHNAKTKPREEQYNSTYRVVSVLTVLHQDWLNGKEYKCKV |
| | SNKALPAPIEKTISKAKGQPREPQVYTLPPSRDELTKNQVSLTCLVKGF |
| | YPSDIAVEWESFGTEWSNYKTTPPVLDSDGSFFLYSKLTVSKEEWQQG |
| | FVFSCSVMHEALHNHYTQKSLSLSPGK (SEQ ID NO: 2386) |
| Clone CH3C.35.S413 | APELLGGPSVFLFPPKPKDTLMISRTPEVTCVVVDVSHEDPEVKFNWY |
| | VDGVEVHNAKTKPREEQYNSTYRVVSVLTVLHQDWLNGKEYKCKV |
| | SNKALPAPIEKTISKAKGQPREPQVYTLPPSRDELTKNQVSLTCLVKGF |
| | YPSDIAVEWESYGTEWSSYKTTPPVLDSDGSFFLYSKLTVSKSEWQQG |
| | FVFSCSVMHEALHNHYTQKSLSLSPGK (SEQ ID NO: 2387) |
| Clone | APELLGGPSVFLFPPKPKDTLMISRTPEVTCVVVDVSHEDPEVKFNWY |
| CH3C.35.23.3.1 | VDGVEVHNAKTKPREEQYNSTYRVVSVLTVLHQDWLNGKEYKCKV |
| | SNKALPAPIEKTISKAKGQPREPQVYTLPPSRDELTKNQVSLTCLVKGF |
| | YPSDIAVEWESYGTEWVNYKTTPPVLDSDGSFFLYSKLTVSKEEWQQ |
| | GFVFSCSVMHEALHNHYTQKSLSLSPGK (SEQ ID NO: 2388) |
| Clone | APELLGGPSVFLFPPKPKDTLMISRTPEVTCVVVDVSHEDPEVKFNWY |
| CH3C.35.N390.1 | VDGVEVHNAKTKPREEQYNSTYRVVSVLTVLHQDWLNGKEYKCKV |
| | SNKALPAPIEKTISKAKGQPREPQVYTLPPSRDELTKNQVSLTCLVKGF |
| | YPSDIAVEWESYGTEWSNYKTTPPVLDSDGSFFLYSKLTVSKSEWQQ |
| | GFVFSCSVMHEALHNHYTQKSLSLSPGK (SEQ ID NO: 2389) |
| Clone | APELLGGPSVFLFPPKPKDTLMISRTPEVTCVVVDVSHEDPEVKFNWY |
| CH3C.35.23.6.1 | VDGVEVHNAKTKPREEQYNSTYRVVSVLTVLHQDWLNGKEYKCKV |
| | SNKALPAPIEKTISKAKGQPREPQVYTLPPSRDELTKNQVSLTCLVKGF |
| | YPSDIAVEWESFGTEWVNYKTTPPVLDSDGSFFLYSKLTVSKEEWQQ |
| | GFVFSCSVMHEALHNHYTQKSLSLSPGK (SEQ ID NO: 2390) |
| Clone CH3C.35.21 | APEAAGGPSVFLFPPKPKDTLMISRTPEVTCVVVDVSHEDPEVKFNWY |
| with knob and | VDGVEVHNAKTKPREEQYNSTYRVVSVLTVLHQDWLNGKEYKCKV |
| LALAPG mutations | SNKALGAPIEKTISKAKGQPREPQVYTLPPSRDELTKNQVSLWCLVKG |
| | FYPSDIAVWWESYGTEWSSYKTTPPVLDSDGSFFLYSKLTVTKEEWQ |
| | QGFVFSCSVMHEALHNHYTQKSLSLSPGK (SEQ ID NO: 2391) |
| Clone CH3C.35.21 | APEAAGGPSVFLFPPKPKDTLYITREPEVTCVVVDVSHEDPEVKFNWY |
| with knob, LALAPG, | VDGVEVHNAKTKPREEQYNSTYRVVSVLTVLHQDWLNGKEYKCKV |
| and YTE mutations | SNKALGAPIEKTISKAKGQPREPQVYTLPPSRDELTKNQVSLWCLVKG |
| | FYPSDIAVWWESYGTEWSSYKTTPPVLDSDGSFFLYSKLTVTKEEWQ |
| | QGFVFSCSVMHEALHNHYTQKSLSLSPGK (SEQ ID NO: 2392) |
| Clone CH3C.35.21 | APEAAGGPSVFLFPPKPKDTLMISRTPEVTCVVVDVSHEDPEVKFNWY |
| with hole and | VDGVEVHNAKTKPREEQYNSTYRVVSVLTVLHQDWLNGKEYKCKV |
| LALAPG mutations | SNKALGAPIEKTISKAKGQPREPQVYTLPPSRDELTKNQVSLSCAVKG |
| | FYPSDIAVWWESYGTEWSSYKTTPPVLDSDGSFFLVSKLTVTKEEWQ |
| | QGFVFSCSVMHEALHNHYTQKSLSLSPGK (SEQ ID NO: 2393) |
| Clone CH3C.35.21 | APEAAGGPSVFLFPPKPKDTLYITREPEVTCVVVDVSHEDPEVKFNWY |
| with hole, LALAPG, | VDGVEVHNAKTKPREEQYNSTYRVVSVLTVLHQDWLNGKEYKCKV |
| and YTE mutations | SNKALGAPIEKTISKAKGQPREPQVYTLPPSRDELTKNQVSLSCAVKG |
| | FYPSDIAVWWESYGTEWSSYKTTPPVLDSDGSFFLVSKLTVTKEEWQ |
| | QGFVFSCSVMHEALHNHYTQKSLSLSPGK (SEQ ID NO: 2394) |
| Clone | APELLGGPSVFLFPPKPKDTLMISRTPEVTCVVVDVSHEDPEVKFNWY |
| CH3C.35.20.1.1 with | VDGVEVHNAKTKPREEQYNSTYRVVSVLTVLHQDWLNGKEYKCKV |
| knob mutation | SNKALPAPIEKTISKAKGQPREPQVYTLPPSRDELTKNQVSLWCLVKG |
| | FYPSDIAVEWESFGTEWSSYKTTPPVLDSDGSFFLYSKLTVSKEEWQQ |
| | GFVFSCSVMHEALHNHYTQKSLSLSPGK (SEQ ID NO: 2395) |
| Clone | APEAAGGPSVFLFPPKPKDTLMISRTPEVTCVVVDVSHEDPEVKFNWY |
| CH3C.35.20.1.1 with | VDGVEVHNAKTKPREEQYNSTYRVVSVLTVLHQDWLNGKEYKCKV |
| knob and LALA | SNKALPAPIEKTISKAKGQPREPQVYTLPPSRDELTKNQVSLWCLVKG |
| mutations | FYPSDIAVEWESFGTEWSSYKTTPPVLDSDGSFFLYSKLTVSKEEWQQ |
| | GFVFSCSVMHEALHNHYTQKSLSLSPGK (SEQ ID NO: 2396) |
| Clone | APEAAGGPSVFLFPPKPKDTLMISRTPEVTCVVVDVSHEDPEVKFNWY |
| CH3C.35.20.1.1 with | VDGVEVHNAKTKPREEQYNSTYRVVSVLTVLHQDWLNGKEYKCKV |
| knob and LALAPG | SNKALGAPIEKTISKAKGQPREPQVYTLPPSRDELTKNQVSLWCLVKG |
| mutations | FYPSDIAVEWESFGTEWSSYKTTPPVLDSDGSFFLYSKLTVSKEEWQQ |
| | GFVFSCSVMHEALHNHYTQKSLSLSPGK (SEQ ID NO: 2397) |
| Clone | APELLGGPSVFLFPPKPKDTLYITREPEVTCVVVDVSHEDPEVKFNWY |
| CH3C.35.20.1.1 with | VDGVEVHNAKTKPREEQYNSTYRVVSVLTVLHQDWLNGKEYKCKV |
| knob and YTE | SNKALPAPIEKTISKAKGQPREPQVYTLPPSRDELTKNQVSLWCLVKG |
| mutations | FYPSDIAVEWESFGTEWSSYKTTPPVLDSDGSFFLYSKLTVSKEEWQQ |
| | GFVFSCSVMHEALHNHYTQKSLSLSPGK (SEQ ID NO: 2398) |
| Clone | APEAAGGPSVFLFPPKPKDTLYITREPEVTCVVVDVSHEDPEVKFNWY |
| CH3C.35.20.1.1 with | VDGVEVHNAKTKPREEQYNSTYRVVSVLTVLHQDWLNGKEYKCKV |
| knob, LALA, and | SNKALPAPIEKTISKAKGQPREPQVYTLPPSRDELTKNQVSLWCLVKG |
| YTE mutations | FYPSDIAVEWESFGTEWSSYKTTPPVLDSDGSFFLYSKLTVSKEEWQQ |
| | GFVFSCSVMHEALHNHYTQKSLSLSPGK (SEQ ID NO: 2399) |
| Clone | APEAAGGPSVFLFPPKPKDTLYITREPEVTCVVVDVSHEDPEVKFNWY |
| CH3C.35.20.1.1 with | VDGVEVHNAKTKPREEQYNSTYRVVSVLTVLHQDWLNGKEYKCKV |
| knob, LALAPG, and | SNKALGAPIEKTISKAKGQPREPQVYTLPPSRDELTKNQVSLWCLVKG |
| YTE mutations | FYPSDIAVEWESFGTEWSSYKTTPPVLDSDGSFFLYSKLTVSKEEWQQ |
| | GFVFSCSVMHEALHNHYTQKSLSLSPGK (SEQ ID NO: 2400) |
| Clone | APELLGGPSVFLFPPKPKDTLMISRTPEVTCVVVDVSHEDPEVKFNWY |
| CH3C.35.20.1.1 with | VDGVEVHNAKTKPREEQYNSTYRVVSVLTVLHQDWLNGKEYKCKV |
| hole mutations | SNKALPAPIEKTISKAKGQPREPQVYTLPPSRDELTKNQVSLSCAVKGF |
| | YPSDIAVEWESFGTEWSSYKTTPPVLDSDGSFFLVSKLTVSKEEWQQG |
| | FVFSCSVMHEALHNHYTQKSLSLSPGK (SEQ ID NO: 2401) |
| Clone | APEAAGGPSVFLFPPKPKDTLMISRTPEVTCVVVDVSHEDPEVKFNWY |
| CH3C.35.20.1.1 with | VDGVEVHNAKTKPREEQYNSTYRVVSVLTVLHQDWLNGKEYKCKV |
| hole and LALA | SNKALPAPIEKTISKAKGQPREPQVYTLPPSRDELTKNQVSLSCAVKGF |
| mutations | YPSDIAVEWESFGTEWSSYKTTPPVLDSDGSFFLVSKLTVSKEEWQQG |
| | FVFSCSVMHEALHNHYTQKSLSLSPGK (SEQ ID NO: 2402) |
| Clone | APEAAGGPSVFLFPPKPKDTLMISRTPEVTCVVVDVSHEDPEVKFNWY |
| CH3C.35.20.1.1 with | VDGVEVHNAKTKPREEQYNSTYRVVSVLTVLHQDWLNGKEYKCKV |
| hole and LALAPG | SNKALGAPIEKTISKAKGQPREPQVYTLPPSRDELTKNQVSLSCAVKG |
| mutations | FYPSDIAVEWESFGTEWSSYKTTPPVLDSDGSFFLVSKLTVSKEEWQQ |
| | GFVFSCSVMHEALHNHYTQKSLSLSPGK (SEQ ID NO: 2403) |
| Clone | APELLGGPSVFLFPPKPKDTLYITREPEVTCVVVDVSHEDPEVKFNWY |
| CH3C.35.20.1.1 with | VDGVEVHNAKTKPREEQYNSTYRVVSVLTVLHQDWLNGKEYKCKV |
| hole and YTE | SNKALPAPIEKTISKAKGQPREPQVYTLPPSRDELTKNQVSLSCAVKGF |
| mutations | YPSDIAVEWESFGTEWSSYKTTPPVLDSDGSFFLVSKLTVSKEEWQQG |
| | FVFSCSVMHEALHNHYTQKSLSLSPGK (SEQ ID NO: 2404) |
| Clone | APEAAGGPSVFLFPPKPKDTLYITREPEVTCVVVDVSHEDPEVKFNWY |
| CH3C.35.20.1.1 with | VDGVEVHNAKTKPREEQYNSTYRVVSVLTVLHQDWLNGKEYKCKV |
| hole, LALA, and YTE | SNKALPAPIEKTISKAKGQPREPQVYTLPPSRDELTKNQVSLSCAVKGF |
| mutations | YPSDIAVEWESFGTEWSSYKTTPPVLDSDGSFFLVSKLTVSKEEWQQG |
| | FVFSCSVMHEALHNHYTQKSLSLSPGK (SEQ ID NO: 2405) |
| Clone | APEAAGGPSVFLFPPKPKDTLYITREPEVTCVVVDVSHEDPEVKFNWY |
| CH3C.35.20.1.1 with | VDGVEVHNAKTKPREEQYNSTYRVVSVLTVLHQDWLNGKEYKCKV |
| hole, LALAPG, and | SNKALGAPIEKTISKAKGQPREPQVYTLPPSRDELTKNQVSLSCAVKG |
| YTE mutations | FYPSDIAVEWESFGTEWSSYKTTPPVLDSDGSFFLVSKLTVSKEEWQQ |
| | GFVFSCSVMHEALHNHYTQKSLSLSPGK (SEQ ID NO: 2406) |
| Clone | APELLGGPSVFLFPPKPKDTLMISRTPEVTCVVVDVSHEDPEVKFNWY |
| CH3C.35.23.2.1 with | VDGVEVHNAKTKPREEQYNSTYRVVSVLTVLHQDWLNGKEYKCKV |
| knob mutation | SNKALPAPIEKTISKAKGQPREPQVYTLPPSRDELTKNQVSLWCLVKG |
| | FYPSDIAVEWESYGTEWANYKTTPPVLDSDGSFFLYSKLTVSKSEWQ |
| | QGFVFSCSVMHEALHNHYTQKSLSLSPGK (SEQ ID NO: 2407) |
| Clone | APEAAGGPSVFLFPPKPKDTLMISRTPEVTCVVVDVSHEDPEVKFNWY |
| CH3C.35.23.2.1 with | VDGVEVHNAKTKPREEQYNSTYRVVSVLTVLHQDWLNGKEYKCKV |
| knob and LALA | SNKALPAPIEKTISKAKGQPREPQVYTLPPSRDELTKNQVSLWCLVKG |
| mutations | FYPSDIAVEWESYGTEWANYKTTPPVLDSDGSFFLYSKLTVSKSEWQ |
| | QGFVFSCSVMHEALHNHYTQKSLSLSPGK (SEQ ID NO: 2408) |
| Clone | APEAAGGPSVFLFPPKPKDTLMISRTPEVTCVVVDVSHEDPEVKFNWY |
| CH3C.35.23.2.1 with | VDGVEVHNAKTKPREEQYNSTYRVVSVLTVLHQDWLNGKEYKCKV |
| knob and LALAPG | SNKALGAPIEKTISKAKGQPREPQVYTLPPSRDELTKNQVSLWCLVKG |
| mutations | FYPSDIAVEWESYGTEWANYKTTPPVLDSDGSFFLYSKLTVSKSEWQ |
| | QGFVFSCSVMHEALHNHYTQKSLSLSPGK (SEQ ID NO: 2409) |
| Clone | APELLGGPSVFLFPPKPKDTLYITREPEVTCVVVDVSHEDPEVKFNWY |
| CH3C.35.23.2.1 with | VDGVEVHNAKTKPREEQYNSTYRVVSVLTVLHQDWLNGKEYKCKV |
| knob and YTE | SNKALPAPIEKTISKAKGQPREPQVYTLPPSRDELTKNQVSLWCLVKG |
| mutations | FYPSDIAVEWESYGTEWANYKTTPPVLDSDGSFFLYSKLTVSKSEWQ |
| | QGFVFSCSVMHEALHNHYTQKSLSLSPGK (SEQ ID NO: 2410) |
| Clone | APEAAGGPSVFLFPPKPKDTLYITREPEVTCVVVDVSHEDPEVKFNWY |
| CH3C.35.23.2.1 with | VDGVEVHNAKTKPREEQYNSTYRVVSVLTVLHQDWLNGKEYKCKV |
| knob, LALA, and | SNKALPAPIEKTISKAKGQPREPQVYTLPPSRDELTKNQVSLWCLVKG |
| YTE mutations | FYPSDIAVEWESYGTEWANYKTTPPVLDSDGSFFLYSKLTVSKSEWQ |
| | QGFVFSCSVMHEALHNHYTQKSLSLSPGK (SEQ ID NO: 2411) |
| Clone | APEAAGGPSVFLFPPKPKDTLYITREPEVTCVVVDVSHEDPEVKFNWY |
| CH3C.35.23.2.1 with | VDGVEVHNAKTKPREEQYNSTYRVVSVLTVLHQDWLNGKEYKCKV |
| knob, LALAPG, and | SNKALGAPIEKTISKAKGQPREPQVYTLPPSRDELTKNQVSLWCLVKG |
| YTE mutations | FYPSDIAVEWESYGTEWANYKTTPPVLDSDGSFFLYSKLTVSKSEWQ |
| | QGFVFSCSVMHEALHNHYTQKSLSLSPGK (SEQ ID NO: 2412) |
| Clone | APELLGGPSVFLFPPKPKDTLMISRTPEVTCVVVDVSHEDPEVKFNWY |
| CH3C.35.23.2.1 with | VDGVEVHNAKTKPREEQYNSTYRVVSVLTVLHQDWLNGKEYKCKV |
| hole mutations | SNKALPAPIEKTISKAKGQPREPQVYTLPPSRDELTKNQVSLSCAVKGF |
| | YPSDIAVEWESYGTEWANYKTTPPVLDSDGSFFLVSKLTVSKSEWQQ |
| | GFVFSCSVMHEALHNHYTQKSLSLSPGK (SEQ ID NO: 2413) |
| Clone | APEAAGGPSVFLFPPKPKDTLMISRTPEVTCVVVDVSHEDPEVKFNWY |
| CH3C.35.23.2.1 with | VDGVEVHNAKTKPREEQYNSTYRVVSVLTVLHQDWLNGKEYKCKV |
| hole and LALA | SNKALPAPIEKTISKAKGQPREPQVYTLPPSRDELTKNQVSLSCAVKGF |
| mutations | YPSDIAVEWESYGTEWANYKTTPPVLDSDGSFFLVSKLTVSKSEWQQ |
| | GFVFSCSVMHEALHNHYTQKSLSLSPGK (SEQ ID NO: 2414) |
| Clone | APEAAGGPSVFLFPPKPKDTLMISRTPEVTCVVVDVSHEDPEVKFNWY |
| CH3C.35.23.2.1 with | VDGVEVHNAKTKPREEQYNSTYRVVSVLTVLHQDWLNGKEYKCKV |
| hole and LALAPG | SNKALGAPIEKTISKAKGQPREPQVYTLPPSRDELTKNQVSLSCAVKG |
| mutations | FYPSDIAVEWESYGTEWANYKTTPPVLDSDGSFFLVSKLTVSKSEWQ |
| | QGFVFSCSVMHEALHNHYTQKSLSLSPGK (SEQ ID NO: 2415) |
| Clone | APELLGGPSVFLFPPKPKDTLYITREPEVTCVVVDVSHEDPEVKFNWY |
| CH3C.35.23.2.1 with | VDGVEVHNAKTKPREEQYNSTYRVVSVLTVLHQDWLNGKEYKCKV |
| hole and YTE | SNKALPAPIEKTISKAKGQPREPQVYTLPPSRDELTKNQVSLSCAVKGF |
| mutations | YPSDIAVEWESYGTEWANYKTTPPVLDSDGSFFLVSKLTVSKSEWQQ |
| | GFVFSCSVMHEALHNHYTQKSLSLSPGK (SEQ ID NO: 2416) |
| Clone | APEAAGGPSVFLFPPKPKDTLYITREPEVTCVVVDVSHEDPEVKFNWY |
| CH3C.35.23.2.1 with | VDGVEVHNAKTKPREEQYNSTYRVVSVLTVLHQDWLNGKEYKCKV |
| hole, LALA, and YTE | SNKALPAPIEKTISKAKGQPREPQVYTLPPSRDELTKNQVSLSCAVKGF |
| mutations | YPSDIAVEWESYGTEWANYKTTPPVLDSDGSFFLVSKLTVSKSEWQQ |
| | GFVFSCSVMHEALHNHYTQKSLSLSPGK (SEQ ID NO: 2417) |
| Clone | APEAAGGPSVFLFPPKPKDTLYITREPEVTCVVVDVSHEDPEVKFNWY |
| CH3C.35.23.2.1 with | VDGVEVHNAKTKPREEQYNSTYRVVSVLTVLHQDWLNGKEYKCKV |
| hole, LALAPG, and | SNKALGAPIEKTISKAKGQPREPQVYTLPPSRDELTKNQVSLSCAVKG |
| YTE mutations | FYPSDIAVEWESYGTEWANYKTTPPVLDSDGSFFLVSKLTVSKSEWQ |
| | QGFVFSCSVMHEALHNHYTQKSLSLSPGK (SEQ ID NO: 2418) |
| Clone CH3C.35.23.1.1 | APELLGGPSVFLFPPKPKDTLMISRTPEVTCVVVDVSHEDPEVKFNWY |
| with knob | VDGVEVHNAKTKPREEQYNSTYRVVSVLTVLHQDWLNGKEYKCKV |
| mutation | SNKALPAPIEKTISKAKGQPREPQVYTLPPSRDELTKNQVSLWCLVKG |
| | FYPSDIAVEWESFGTEWSNYKTTPPVLDSDGSFFLYSKLTVSKEEWQQ |
| | GFVFSCSVMHEALHNHYTQKSLSLSPGK (SEQ ID NO: 2419) |
| Clone CH3C.35.23.1.1 | APEAAGGPSVFLFPPKPKDTLMISRTPEVTCVVVDVSHEDPEVKFNWY |
| with knob and | VDGVEVHNAKTKPREEQYNSTYRVVSVLTVLHQDWLNGKEYKCKV |
| LALA mutations | SNKALPAPIEKTISKAKGQPREPQVYTLPPSRDELTKNQVSLWCLVKG |
| | FYPSDIAVEWESFGTEWSNYKTTPPVLDSDGSFFLYSKLTVSKEEWQQ |
| | GFVFSCSVMHEALHNHYTQKSLSLSPGK (SEQ ID NO: 2420) |
| Clone CH3C.35.23.1.1 | APEAAGGPSVFLFPPKPKDTLMISRTPEVTCVVVDVSHEDPEVKFNWY |
| with knob and | VDGVEVHNAKTKPREEQYNSTYRVVSVLTVLHQDWLNGKEYKCKV |
| LALAPG mutations | SNKALGAPIEKTISKAKGQPREPQVYTLPPSRDELTKNQVSLWCLVKG |
| | FYPSDIAVEWESFGTEWSNYKTTPPVLDSDGSFFLYSKLTVSKEEWQQ |
| | GFVFSCSVMHEALHNHYTQKSLSLSPGK (SEQ ID NO: 2421) |
| Clone CH3C.35.23.1.1 | APELLGGPSVFLFPPKPKDTLYITREPEVTCVVVDVSHEDPEVKFNWY |
| with knob and | VDGVEVHNAKTKPREEQYNSTYRVVSVLTVLHQDWLNGKEYKCKV |
| YTE mutations | SNKALPAPIEKTISKAKGQPREPQVYTLPPSRDELTKNQVSLWCLVKG |
| | FYPSDIAVEWESFGTEWSNYKTTPPVLDSDGSFFLYSKLTVSKEEWQQ |
| | GFVFSCSVMHEALHNHYTQKSLSLSPGK (SEQ ID NO: 2422) |
| Clone CH3C.35.23.1.1 | APEAAGGPSVFLFPPKPKDTLYITREPEVTCVVVDVSHEDPEVKFNWY |
| with knob, LALA, | VDGVEVHNAKTKPREEQYNSTYRVVSVLTVLHQDWLNGKEYKCKV |
| and YTE mutations | SNKALPAPIEKTISKAKGQPREPQVYTLPPSRDELTKNQVSLWCLVKG |
| | FYPSDIAVEWESFGTEWSNYKTTPPVLDSDGSFFLYSKLTVSKEEWQQ |
| | GFVFSCSVMHEALHNHYTQKSLSLSPGK (SEQ ID NO: 2423) |
| Clone CH3C.35.23.1.1 | APEAAGGPSVFLFPPKPKDTLYITREPEVTCVVVDVSHEDPEVKFNWY |
| with knob, | VDGVEVHNAKTKPREEQYNSTYRVVSVLTVLHQDWLNGKEYKCKV |
| LALAPG, and YTE | SNKALGAPIEKTISKAKGQPREPQVYTLPPSRDELTKNQVSLWCLVKG |
| mutations | FYPSDIAVEWESFGTEWSNYKTTPPVLDSDGSFFLYSKLTVSKEEWQQ |
| | GFVFSCSVMHEALHNHYTQKSLSLSPGK (SEQ ID NO: 2424) |
| Clone CH3C.35.23.1.1 | APELLGGPSVFLFPPKPKDTLMISRTPEVTCVVVDVSHEDPEVKFNWY |
| with hole | VDGVEVHNAKTKPREEQYNSTYRVVSVLTVLHQDWLNGKEYKCKV |
| mutations | SNKALPAPIEKTISKAKGQPREPQVYTLPPSRDELTKNQVSLSCAVKGF |
| | YPSDIAVEWESFGTEWSNYKTTPPVLDSDGSFFLVSKLTVSKEEWQQG |
| | FVFSCSVMHEALHNHYTQKSLSLSPGK (SEQ ID NO: 2425) |
| Clone CH3C.35.23.1.1 | APEAAGGPSVFLFPPKPKDTLMISRTPEVTCVVVDVSHEDPEVKFNWY |
| with hole and | VDGVEVHNAKTKPREEQYNSTYRVVSVLTVLHQDWLNGKEYKCKV |
| LALA mutations | SNKALPAPIEKTISKAKGQPREPQVYTLPPSRDELTKNQVSLSCAVKGF |
| | YPSDIAVEWESFGTEWSNYKTTPPVLDSDGSFFLVSKLTVSKEEWQQG |
| | FVFSCSVMHEALHNHYTQKSLSLSPGK (SEQ ID NO: 2426) |
| Clone CH3C.35.23.1.1 | APEAAGGPSVFLFPPKPKDTLMISRTPEVTCVVVDVSHEDPEVKFNWY |
| with hole and | VDGVEVHNAKTKPREEQYNSTYRVVSVLTVLHQDWLNGKEYKCKV |
| LALAPG mutations | SNKALGAPIEKTISKAKGQPREPQVYTLPPSRDELTKNQVSLSCAVKG |
| | FYPSDIAVEWESFGTEWSNYKTTPPVLDSDGSFFLVSKLTVSKEEWQQ |
| | GFVFSCSVMHEALHNHYTQKSLSLSPGK (SEQ ID NO: 2427) |
| Clone CH3C.35.23.1.1 | APELLGGPSVFLFPPKPKDTLYITREPEVTCVVVDVSHEDPEVKFNWY |
| with hole and | VDGVEVHNAKTKPREEQYNSTYRVVSVLTVLHQDWLNGKEYKCKV |
| YTE mutations | SNKALPAPIEKTISKAKGQPREPQVYTLPPSRDELTKNQVSLSCAVKGF |
| | YPSDIAVEWESFGTEWSNYKTTPPVLDSDGSFFLVSKLTVSKEEWQQG |
| | FVFSCSVMHEALHNHYTQKSLSLSPGK (SEQ ID NO: 2428) |
| Clone CH3C.35.23.1.1 | APEAAGGPSVFLFPPKPKDTLYITREPEVTCVVVDVSHEDPEVKFNWY |
| with hole, LALA, | VDGVEVHNAKTKPREEQYNSTYRVVSVLTVLHQDWLNGKEYKCKV |
| and YTE mutations | SNKALPAPIEKTISKAKGQPREPQVYTLPPSRDELTKNQVSLSCAVKGF |
| | YPSDIAVEWESFGTEWSNYKTTPPVLDSDGSFFLVSKLTVSKEEWQQG |
| | FVFSCSVMHEALHNHYTQKSLSLSPGK (SEQ ID NO: 2429) |
| Clone CH3C.35.23.1.1 | APEAAGGPSVFLFPPKPKDTLYITREPEVTCVVVDVSHEDPEVKFNWY |
| with hole, | VDGVEVHNAKTKPREEQYNSTYRVVSVLTVLHQDWLNGKEYKCKV |
| LALAPG, and YTE | SNKALGAPIEKTISKAKGQPREPQVYTLPPSRDELTKNQVSLSCAVKG |
| mutations | FYPSDIAVEWESFGTEWSNYKTTPPVLDSDGSFFLVSKLTVSKEEWQQ |
| | GFVFSCSVMHEALHNHYTQKSLSLSPGK (SEQ ID NO: 2430) |
| Clone CH3C.35.20.1 | APELLGGPSVFLFPPKPKDTLMISRTPEVTCVVVDVSHEDPEVKFNWY |
| M428L and N434S | VDGVEVHNAKTKPREEQYNSTYRVVSVLTVLHQDWLNGKEYKCKV |
| mutations | SNKALPAPIEKTISKAKGQPREPQVYTLPPSRDELTKNQVSLTCLVKGF |
| | YPSDIAVEWESFGTEWSSYKTTPPVLDSDGSFFLYSKLTVTKEEWQQG |
| | FVFSCSVLHEALHSHYTQKSLSLSPGK (SEQ ID NO: 2431) |
| Clone CH3C.35.20.1 | APELLGGPSVFLFPPKPKDTLMISRTPEVTCVVVDVSHEDPEVKFNWY |
| with knob and M428L | VDGVEVHNAKTKPREEQYNSTYRVVSVLTVLHQDWLNGKEYKCKV |
| and N4345 mutations | SNKALPAPIEKTISKAKGQPREPQVYTLPPSRDELTKNQVSLWCLVKG |
| | FYPSDIAVEWESFGTEWSSYKTTPPVLDSDGSFFLYSKLTVTKEEWQQ |
| | GFVFSCSVLHEALHSHYTQKSLSLSPGK (SEQ ID NO: 2432) |
| Clone CH3C.35.20.1 | APEAAGGPSVFLFPPKPKDTLMISRTPEVTCVVVDVSHEDPEVKFNWY |
| with knob, LALA, | VDGVEVHNAKTKPREEQYNSTYRVVSVLTVLHQDWLNGKEYKCKV |
| and M428L and | SNKALPAPIEKTISKAKGQPREPQVYTLPPSRDELTKNQVSLWCLVKG |
| N434S mutations | FYPSDIAVEWESFGTEWSSYKTTPPVLDSDGSFFLYSKLTVTKEEWQQ |
| | GFVFSCSVLHEALHSHYTQKSLSLSPGK (SEQ ID NO: 2433) |
| Clone CH3C.35.20.1 | APEAAGGPSVFLFPPKPKDTLMISRTPEVTCVVVDVSHEDPEVKFNWY |
| with knob, LALAPG, | VDGVEVHNAKTKPREEQYNSTYRVVSVLTVLHQDWLNGKEYKCKV |
| and M428L and | SNKALGAPIEKTISKAKGQPREPQVYTLPPSRDELTKNQVSLWCLVKG |
| N434S mutations | FYPSDIAVEWESFGTEWSSYKTTPPVLDSDGSFFLYSKLTVTKEEWQQ |
| | GFVFSCSVLHEALHSHYTQKSLSLSPGK (SEQ ID NO: 2434) |
| Clone CH3C.35.20.1 | APELLGGPSVFLFPPKPKDTLMISRTPEVTCVVVDVSHEDPEVKFNWY |
| with hole and M428L | VDGVEVHNAKTKPREEQYNSTYRVVSVLTVLHQDWLNGKEYKCKV |
| and N4345 mutations | SNKALPAPIEKTISKAKGQPREPQVYTLPPSRDELTKNQVSLSCAVKGF |
| | YPSDIAVEWESFGTEWSSYKTTPPVLDSDGSFFLVSKLTVTKEEWQQG |
| | FVFSCSVLHEALHSHYTQKSLSLSPGK (SEQ ID NO: 2435) |
| Clone CH3C.35.20.1 | APEAAGGPSVFLFPPKPKDTLMISRTPEVTCVVVDVSHEDPEVKFNWY |
| with hole, LALA, and | VDGVEVHNAKTKPREEQYNSTYRVVSVLTVLHQDWLNGKEYKCKV |
| M428L and N434S | SNKALPAPIEKTISKAKGQPREPQVYTLPPSRDELTKNQVSLSCAVKGF |
| mutations | YPSDIAVEWESFGTEWSSYKTTPPVLDSDGSFFLVSKLTVTKEEWQQG |
| | FVFSCSVLHEALHSHYTQKSLSLSPGK (SEQ ID NO: 2436) |
| Clone CH3C.35.20.1 | APEAAGGPSVFLFPPKPKDTLMISRTPEVTCVVVDVSHEDPEVKFNWY |
| with hole, LALAPG, | VDGVEVHNAKTKPREEQYNSTYRVVSVLTVLHQDWLNGKEYKCKV |
| and M428L and | SNKALGAPIEKTISKAKGQPREPQVYTLPPSRDELTKNQVSLSCAVKG |
| N434S mutations | FYPSDIAVEWESFGTEWSSYKTTPPVLDSDGSFFLVSKLTVTKEEWQQ |
| | GFVFSCSVLHEALHSHYTQKSLSLSPGK (SEQ ID NO: 2437) |
| Clone | APELLGGPSVFLFPPKPKDTLMISRTPEVTCVVVDVSHEDPEVKFNWY |
| CH3C.35.20.1.1 with | VDGVEVHNAKTKPREEQYNSTYRVVSVLTVLHQDWLNGKEYKCKV |
| M428L and N4345 | SNKALPAPIEKTISKAKGQPREPQVYTLPPSRDELTKNQVSLTCLVKGF |
| mutations | YPSDIAVEWESFGTEWSSYKTTPPVLDSDGSFFLYSKLTVSKEEWQQG |
| | FVFSCSVLHEALHSHYTQKSLSLSPGK (SEQ ID NO: 2438) |
| Clone | APELLGGPSVFLFPPKPKDTLMISRTPEVTCVVVDVSHEDPEVKFNWY |
| CH3C.35.20.1.1 with | VDGVEVHNAKTKPREEQYNSTYRVVSVLTVLHQDWLNGKEYKCKV |
| knob and M428L and | SNKALPAPIEKTISKAKGQPREPQVYTLPPSRDELTKNQVSLWCLVKG |
| N434S mutations | FYPSDIAVEWESFGTEWSSYKTTPPVLDSDGSFFLYSKLTVSKEEWQQ |
| | GFVFSCSVLHEALHSHYTQKSLSLSPGK (SEQ ID NO: 2439) |
| Clone | APEAAGGPSVFLFPPKPKDTLMISRTPEVTCVVVDVSHEDPEVKFNWY |
| CH3C.35.20.1.1 with | VDGVEVHNAKTKPREEQYNSTYRVVSVLTVLHQDWLNGKEYKCKV |
| knob, LALA, and | SNKALPAPIEKTISKAKGQPREPQVYTLPPSRDELTKNQVSLWCLVKG |
| M428L and N434S | FYPSDIAVEWESFGTEWSSYKTTPPVLDSDGSFFLYSKLTVSKEEWQQ |
| mutations | GFVFSCSVLHEALHSHYTQKSLSLSPGK (SEQ ID NO: 2440) |
| Clone | APEAAGGPSVFLFPPKPKDTLMISRTPEVTCVVVDVSHEDPEVKFNWY |
| CH3C.35.20.1.1 with | VDGVEVHNAKTKPREEQYNSTYRVVSVLTVLHQDWLNGKEYKCKV |
| knob, LALAPG, and | SNKALGAPIEKTISKAKGQPREPQVYTLPPSRDELTKNQVSLWCLVKG |
| M428L and N434S | FYPSDIAVEWESFGTEWSSYKTTPPVLDSDGSFFLYSKLTVSKEEWQQ |
| mutations | GFVFSCSVLHEALHSHYTQKSLSLSPGK (SEQ ID NO: 2441) |
| APELLGGP | SVFLFPPKPKDTLMISRTPEVTCVVVDVSHEDPEVKFNWY |
| Clone | VDGVEVHNAKTKPREEQYNSTYRVVSVLTVLHQDWLNGKEYKCKV |
| CH3C.35.20.1.1 with | SNKALPAPIEKTISKAKGQPREPQVYTLPPSRDELTKNQVSLSCAVKGF |
| hole and M428L and | YPSDIAVEWESFGTEWSSYKTTPPVLDSDGSFFLVSKLTVSKEEWQQG |
| N434S mutations | FVFSCSVLHEALHSHYTQKSLSLSPGK (SEQ ID NO: 2442) |
| Clone | APEAAGGPSVFLFPPKPKDTLMISRTPEVTCVVVDVSHEDPEVKFNWY |
| CH3C.35.20.1.1 with | VDGVEVHNAKTKPREEQYNSTYRVVSVLTVLHQDWLNGKEYKCKV |
| hole, LALA, and | SNKALPAPIEKTISKAKGQPREPQVYTLPPSRDELTKNQVSLSCAVKGF |
| M428L and N434S | YPSDIAVEWESFGTEWSSYKTTPPVLDSDGSFFLVSKLTVSKEEWQQG |
| mutations | FVFSCSVLHEALHSHYTQKSLSLSPGK (SEQ ID NO: 2443) |
| Clone | APEAAGGPSVFLFPPKPKDTLMISRTPEVTCVVVDVSHEDPEVKFNWY |
| CH3C.35.20.1.1 with | VDGVEVHNAKTKPREEQYNSTYRVVSVLTVLHQDWLNGKEYKCKV |
| hole, LALAPG, and | SNKALGAPIEKTISKAKGQPREPQVYTLPPSRDELTKNQVSLSCAVKG |
| M428L and N434S | FYPSDIAVEWESFGTEWSSYKTTPPVLDSDGSFFLVSKLTVSKEEWQQ |
| mutations | GFVFSCSVLHEALHSHYTQKSLSLSPGK (SEQ ID NO: 2444) |
| Clone CH3C.35.21 | APELLGGPSVFLFPPKPKDTLMISRTPEVTCVVVDVSHEDPEVKFNWY |
| with M428L and | VDGVEVHNAKTKPREEQYNSTYRVVSVLTVLHQDWLNGKEYKCKV |
| N434S mutations | SNKALPAPIEKTISKAKGQPREPQVYTLPPSRDELTKNQVSLTCLVKGF |
| | YPSDIAVWWESYGTEWSSYKTTPPVLDSDGSFFLYSKLTVTKEEWQQ |
| | GFVFSCSVLHEALHSHYTQKSLSLSPGK (SEQ ID NO: 2445) |
| Clone CH3C.35.21 | APELLGGPSVFLFPPKPKDTLMISRTPEVTCVVVDVSHEDPEVKFNWY |
| with knob and M428L | VDGVEVHNAKTKPREEQYNSTYRVVSVLTVLHQDWLNGKEYKCKV |
| and N4345 mutations | SNKALPAPIEKTISKAKGQPREPQVYTLPPSRDELTKNQVSLWCLVKG |
| | FYPSDIAVWWESYGTEWSSYKTTPPVLDSDGSFFLYSKLTVTKEEWQ |
| | QGFVFSCSVLHEALHSHYTQKSLSLSPGK (SEQ ID NO: 2446) |
| Clone CH3C.35.21 | APEAAGGPSVFLFPPKPKDTLMISRTPEVTCVVVDVSHEDPEVKFNWY |
| with knob, LALA, | VDGVEVHNAKTKPREEQYNSTYRVVSVLTVLHQDWLNGKEYKCKV |
| and M428L and | SNKALPAPIEKTISKAKGQPREPQVYTLPPSRDELTKNQVSLWCLVKG |
| N434S mutations | FYPSDIAVWWESYGTEWSSYKTTPPVLDSDGSFFLYSKLTVTKEEWQ |
| | QGFVFSCSVLHEALHSHYTQKSLSLSPGK (SEQ ID NO: 2447) |
| Clone CH3C.35.21 | APEAAGGPSVFLFPPKPKDTLMISRTPEVTCVVVDVSHEDPEVKFNWY |
| with knob, LALAPG, | VDGVEVHNAKTKPREEQYNSTYRVVSVLTVLHQDWLNGKEYKCKV |
| and M428L and | SNKALGAPIEKTISKAKGQPREPQVYTLPPSRDELTKNQVSLWCLVKG |
| N434S mutations | FYPSDIAVWWESYGTEWSSYKTTPPVLDSDGSFFLYSKLTVTKEEWQ |
| | QGFVFSCSVLHEALHSHYTQKSLSLSPGK (SEQ ID NO: 2448) |
| Clone CH3C.35.21 | APELLGGPSVFLFPPKPKDTLMISRTPEVTCVVVDVSHEDPEVKFNWY |
| with hole and M428L | VDGVEVHNAKTKPREEQYNSTYRVVSVLTVLHQDWLNGKEYKCKV |
| and N4345 mutations | SNKALPAPIEKTISKAKGQPREPQVYTLPPSRDELTKNQVSLSCAVKGF |
| | YPSDIAVWWESYGTEWSSYKTTPPVLDSDGSFFLVSKLTVTKEEWQQ |
| | GFVFSCSVLHEALHSHYTQKSLSLSPGK (SEQ ID NO: 2449) |
| Clone CH3C.35.21 | APEAAGGPSVFLFPPKPKDTLMISRTPEVTCVVVDVSHEDPEVKFNWY |
| with hole. LALA, and | VDGVEVHNAKTKPREEQYNSTYRVVSVLTVLHQDWLNGKEYKCKV |
| M428L and N4345 | SNKALPAPIEKTISKAKGQPREPQVYTLPPSRDELTKNQVSLSCAVKGF |
| mutations | YPSDIAVWWESYGTEWSSYKTTPPVLDSDGSFFLVSKLTVTKEEWQQ |
| | GFVFSCSVLHEALHSHYTQKSLSLSPGK (SEQ ID NO: 2450) |
| Clone CH3C.35.21 | APEAAGGPSVFLFPPKPKDTLMISRTPEVTCVVVDVSHEDPEVKFNWY |
| with hole, LALAPG, | VDGVEVHNAKTKPREEQYNSTYRVVSVLTVLHQDWLNGKEYKCKV |
| and M428L and | SNKALGAPIEKTISKAKGQPREPQVYTLPPSRDELTKNQVSLSCAVKG |
| N434S mutations | FYPSDIAVWWESYGTEWSSYKTTPPVLDSDGSFFLVSKLTVTKEEWQ |
| | QGFVFSCSVLHEALHSHYTQKSLSLSPGK (SEQ ID NO: 2451) |
| Clone CH3C.35.21.17.2 | APELLGGPSVFLFPPKPKDTLMISRTPEVTCVVVDVSHEDPEVKFNWY |
| with M428L and | VDGVEVHNAKTKPREEQYNSTYRVVSVLTVLHQDWLNGKEYKCKV |
| N434S mutations | SNKALPAPIEKTISKAKGQPREPQVYTLPPSRDELTKNQVSLTCLVKGF |
| | YPSDIAVLWESYGTEWASYKTTPPVLDSDGSFFLYSKLTVTKEEWQQ |
| | GFVFSCSVLHEALHSHYTQKSLSLSPGK (SEQ ID NO: 2452) |
| Clone CH3C.35.21.17.2 | APELLGGPSVFLFPPKPKDTLMISRTPEVTCVVVDVSHEDPEVKFNWY |
| with knob and | VDGVEVHNAKTKPREEQYNSTYRVVSVLTVLHQDWLNGKEYKCKV |
| M428L and N434S | SNKALPAPIEKTISKAKGQPREPQVYTLPPSRDELTKNQVSLWCLVKG |
| mutations | FYPSDIAVLWESYGTEWASYKTTPPVLDSDGSFFLYSKLTVTKEEWQ |
| | QGFVFSCSVLHEALHSHYTQKSLSLSPGK (SEQ ID NO: 2453) |
| Clone CH3C.35.21.17.2 | APEAAGGPSVFLFPPKPKDTLMISRTPEVTCVVVDVSHEDPEVKFNWY |
| with knob, | VDGVEVHNAKTKPREEQYNSTYRVVSVLTVLHQDWLNGKEYKCKV |
| LALA, and M428L | SNKALPAPIEKTISKAKGQPREPQVYTLPPSRDELTKNQVSLWCLVKG |
| and N4345 mutations | FYPSDIAVLWESYGTEWASYKTTPPVLDSDGSFFLYSKLTVTKEEWQ |
| | QGFVFSCSVLHEALHSHYTQKSLSLSPGK (SEQ ID NO: 2454) |
| Clone CH3C.35.21.17.2 | APEAAGGPSVFLFPPKPKDTLMISRTPEVTCVVVDVSHEDPEVKFNWY |
| with knob, | VDGVEVHNAKTKPREEQYNSTYRVVSVLTVLHQDWLNGKEYKCKV |
| LALAPG, and | SNKALGAPIEKTISKAKGQPREPQVYTLPPSRDELTKNQVSLWCLVKG |
| M428L and N434S | FYPSDIAVLWESYGTEWASYKTTPPVLDSDGSFFLYSKLTVTKEEWQ |
| mutations | QGFVFSCSVLHEALHSHYTQKSLSLSPGK (SEQ ID NO: 2455) |
| Clone CH3C.35.21.17.2 | APELLGGPSVFLFPPKPKDTLMISRTPEVTCVVVDVSHEDPEVKFNWY |
| with hole and | VDGVEVHNAKTKPREEQYNSTYRVVSVLTVLHQDWLNGKEYKCKV |
| M428L and N4345 | SNKALPAPIEKTISKAKGQPREPQVYTLPPSRDELTKNQVSLSCAVKGF |
| mutations | YPSDIAVLWESYGTEWASYKTTPPVLDSDGSFFLVSKLTVTKEEWQQ |
| | GFVFSCSVLHEALHSHYTQKSLSLSPGK (SEQ ID NO: 2456) |
| Clone CH3C.35.21.17.2 | APEAAGGPSVFLFPPKPKDTLMISRTPEVTCVVVDVSHEDPEVKFNWY |
| with hole, | VDGVEVHNAKTKPREEQYNSTYRVVSVLTVLHQDWLNGKEYKCKV |
| LALA, and M428L | SNKALPAPIEKTISKAKGQPREPQVYTLPPSRDELTKNQVSLSCAVKGF |
| and N4345 mutations | YPSDIAVLWESYGTEWASYKTTPPVLDSDGSFFLVSKLTVTKEEWQQ |
| | GFVFSCSVLHEALHSHYTQKSLSLSPGK (SEQ ID NO: 2457) |
| Clone CH3C.35.21.17.2 | APEAAGGPSVFLFPPKPKDTLMISRTPEVTCVVVDVSHEDPEVKFNWY |
| with hole, | VDGVEVHNAKTKPREEQYNSTYRVVSVLTVLHQDWLNGKEYKCKV |
| LALAPG, and | SNKALGAPIEKTISKAKGQPREPQVYTLPPSRDELTKNQVSLSCAVKG |
| M428L and N434S | FYPSDIAVLWESYGTEWASYKTTPPVLDSDGSFFLVSKLTVTKEEWQ |
| mutations | QGFVFSCSVLHEALHSHYTQKSLSLSPGK (SEQ ID NO: 2458) |
| Clone CH3C.35.23 | APELLGGPSVFLFPPKPKDTLMISRTPEVTCVVVDVSHEDPEVKFNWY |
| with M428L and | VDGVEVHNAKTKPREEQYNSTYRVVSVLTVLHQDWLNGKEYKCKV |
| N434S mutations | SNKALPAPIEKTISKAKGQPREPQVYTLPPSRDELTKNQVSLTCLVKGF |
| | YPSDIAVEWESYGTEWSNYKTTPPVLDSDGSFFLYSKLTVTKEEWQQ |
| | GFVFSCSVLHEALHSHYTQKSLSLSPGK (SEQ ID NO: 2459) |
| Clone CH3C.35.23 | APELLGGPSVFLFPPKPKDTLMISRTPEVTCVVVDVSHEDPEVKFNWY |
| with knob and M428L | VDGVEVHNAKTKPREEQYNSTYRVVSVLTVLHQDWLNGKEYKCKV |
| and N434S mutations | SNKALPAPIEKTISKAKGQPREPQVYTLPPSRDELTKNQVSLWCLVKG |
| | FYPSDIAVEWESYGTEWSNYKTTPPVLDSDGSFFLYSKLTVTKEEWQ |
| | QGFVFSCSVLHEALHSHYTQKSLSLSPGK (SEQ ID NO: 2460) |
| Clone CH3C.35.23 | APEAAGGPSVFLFPPKPKDTLMISRTPEVTCVVVDVSHEDPEVKFNWY |
| with knob, LALA, | VDGVEVHNAKTKPREEQYNSTYRVVSVLTVLHQDWLNGKEYKCKV |
| and M428L and | SNKALPAPIEKTISKAKGQPREPQVYTLPPSRDELTKNQVSLWCLVKG |
| N434S mutations | FYPSDIAVEWESYGTEWSNYKTTPPVLDSDGSFFLYSKLTVTKEEWQ |
| | QGFVFSCSVLHEALHSHYTQKSLSLSPGK (SEQ ID NO: 2461) |
| Clone CH3C.35.23 | APEAAGGPSVFLFPPKPKDTLMISRTPEVTCVVVDVSHEDPEVKFNWY |
| with knob, LALAPG, | VDGVEVHNAKTKPREEQYNSTYRVVSVLTVLHQDWLNGKEYKCKV |
| and M428L and | SNKALGAPIEKTISKAKGQPREPQVYTLPPSRDELTKNQVSLWCLVKG |
| N434S mutations | FYPSDIAVEWESYGTEWSNYKTTPPVLDSDGSFFLYSKLTVTKEEWQ |
| | QGFVFSCSVLHEALHSHYTQKSLSLSPGK (SEQ ID NO: 2462) |
| Clone CH3C.35.23 | APELLGGPSVFLFPPKPKDTLMISRTPEVTCVVVDVSHEDPEVKFNWY |
| with hole and M428L | VDGVEVHNAKTKPREEQYNSTYRVVSVLTVLHQDWLNGKEYKCKV |
| and N4345 mutations | SNKALPAPIEKTISKAKGQPREPQVYTLPPSRDELTKNQVSLSCAVKGF |
| | YPSDIAVEWESYGTEWSNYKTTPPVLDSDGSFFLVSKLTVTKEEWQQ |
| | GFVFSCSVLHEALHSHYTQKSLSLSPGK (SEQ ID NO: 2463) |
| Clone CH3C.35.23 | APEAAGGPSVFLFPPKPKDTLMISRTPEVTCVVVDVSHEDPEVKFNWY |
| with hole. LALA, and | VDGVEVHNAKTKPREEQYNSTYRVVSVLTVLHQDWLNGKEYKCKV |
| M428L and N4345 | SNKALPAPIEKTISKAKGQPREPQVYTLPPSRDELTKNQVSLSCAVKGF |
| mutations | YPSDIAVEWESYGTEWSNYKTTPPVLDSDGSFFLVSKLTVTKEEWQQ |
| | GFVFSCSVLHEALHSHYTQKSLSLSPGK (SEQ ID NO: 2464) |
| Clone CH3C.35.23 | APEAAGGPSVFLFPPKPKDTLMISRTPEVTCVVVDVSHEDPEVKFNWY |
| with hole, LALAPG, | VDGVEVHNAKTKPREEQYNSTYRVVSVLTVLHQDWLNGKEYKCKV |
| and M428L and | SNKALGAPIEKTISKAKGQPREPQVYTLPPSRDELTKNQVSLSCAVKG |
| N434S mutations | FYPSDIAVEWESYGTEWSNYKTTPPVLDSDGSFFLVSKLTVTKEEWQ |
| | QGFVFSCSVLHEALHSHYTQKSLSLSPGK (SEQ ID NO: 2465) |
| Clone CH3C.35.23.1.1 | APELLGGPSVFLFPPKPKDTLMISRTPEVTCVVVDVSHEDPEVKFNWY |
| with M428L and | VDGVEVHNAKTKPREEQYNSTYRVVSVLTVLHQDWLNGKEYKCKV |
| N434S mutations | SNKALPAPIEKTISKAKGQPREPQVYTLPPSRDELTKNQVSLTCLVKGF |
| | YPSDIAVEWESFGTEWSNYKTTPPVLDSDGSFFLYSKLTVSKEEWQQG |
| | FVFSCSVLHEALHSHYTQKSLSLSPGK (SEQ ID NO: 2466) |
| Clone CH3C.35.23.1.1 | APELLGGPSVFLFPPKPKDTLMISRTPEVTCVVVDVSHEDPEVKFNWY |
| with knob and | VDGVEVHNAKTKPREEQYNSTYRVVSVLTVLHQDWLNGKEYKCKV |
| M428L and N4345 | SNKALPAPIEKTISKAKGQPREPQVYTLPPSRDELTKNQVSLWCLVKG |
| mutations | FYPSDIAVEWESFGTEWSNYKTTPPVLDSDGSFFLYSKLTVSKEEWQQ |
| | GFVFSCSVLHEALHSHYTQKSLSLSPGK (SEQ ID NO: 2467) |
| Clone CH3C.35.23.1.1 | APEAAGGPSVFLFPPKPKDTLMISRTPEVTCVVVDVSHEDPEVKFNWY |
| with knob, LALA, | VDGVEVHNAKTKPREEQYNSTYRVVSVLTVLHQDWLNGKEYKCKV |
| and M428L and | SNKALPAPIEKTISKAKGQPREPQVYTLPPSRDELTKNQVSLWCLVKG |
| N434S mutations | FYPSDIAVEWESFGTEWSNYKTTPPVLDSDGSFFLYSKLTVSKEEWQQ |
| | GFVFSCSVLHEALHSHYTQKSLSLSPGK (SEQ ID NO: 2468) |
| Clone CH3C.35.23.1.1 | APEAAGGPSVFLFPPKPKDTLMISRTPEVTCVVVDVSHEDPEVKFNWY |
| with knob, | VDGVEVHNAKTKPREEQYNSTYRVVSVLTVLHQDWLNGKEYKCKV |
| LALAPG, and | SNKALGAPIEKTISKAKGQPREPQVYTLPPSRDELTKNQVSLWCLVKG |
| M428L and N434S | FYPSDIAVEWESFGTEWSNYKTTPPVLDSDGSFFLYSKLTVSKEEWQQ |
| mutations | GFVFSCSVLHEALHSHYTQKSLSLSPGK (SEQ ID NO: 2469) |
| | APELLGGPSVFLFPPKPKDTLMISRTPEVTCVVVDVSHEDPEVKFNWY |
| Clone CH3C.35.23.1.1 | VDGVEVHNAKTKPREEQYNSTYRVVSVLTVLHQDWLNGKEYKCKV |
| with hole and | SNKALPAPIEKTISKAKGQPREPQVYTLPPSRDELTKNQVSLSCAVKGF |
| M428L and N434S | YPSDIAVEWESFGTEWSNYKTTPPVLDSDGSFFLVSKLTVSKEEWQQG |
| mutations | FVFSCSVLHEALHSHYTQKSLSLSPGK (SEQ ID NO: 2470) |
| Clone CH3C.35.23.1.1 | APEAAGGPSVFLFPPKPKDTLMISRTPEVTCVVVDVSHEDPEVKFNWY |
| with hole, LALA, | VDGVEVHNAKTKPREEQYNSTYRVVSVLTVLHQDWLNGKEYKCKV |
| and M428L and | SNKALPAPIEKTISKAKGQPREPQVYTLPPSRDELTKNQVSLSCAVKGF |
| N434S mutations | YPSDIAVEWESFGTEWSNYKTTPPVLDSDGSFFLVSKLTVSKEEWQQG |
| | FVFSCSVLHEALHSHYTQKSLSLSPGK (SEQ ID NO: 2471) |
| Clone CH3C.35.23.1.1 | APEAAGGPSVFLFPPKPKDTLMISRTPEVTCVVVDVSHEDPEVKFNWY |
| with hole, | VDGVEVHNAKTKPREEQYNSTYRVVSVLTVLHQDWLNGKEYKCKV |
| LALAPG, and | SNKALGAPIEKTISKAKGQPREPQVYTLPPSRDELTKNQVSLSCAVKG |
| M428L and N434S | FYPSDIAVEWESFGTEWSNYKTTPPVLDSDGSFFLVSKLTVSKEEWQQ |
| mutations | GFVFSCSVLHEALHSHYTQKSLSLSPGK (SEQ ID NO: 2472) |
| Clone CH3C.35.23.2 | APELLGGPSVFLFPPKPKDTLMISRTPEVTCVVVDVSHEDPEVKFNWY |
| with M428L and | VDGVEVHNAKTKPREEQYNSTYRVVSVLTVLHQDWLNGKEYKCKV |
| N434S mutations | SNKALPAPIEKTISKAKGQPREPQVYTLPPSRDELTKNQVSLTCLVKGF |
| | YPSDIAVEWESYGTEWANYKTTPPVLDSDGSFFLYSKLTVTKEEWQQ |
| | GFVFSCSVLHEALHSHYTQKSLSLSPGK (SEQ ID NO: 2473) |
| Clone CH3C.35.23.2 | APELLGGPSVFLFPPKPKDTLMISRTPEVTCVVVDVSHEDPEVKFNWY |
| with knob and M428L | VDGVEVHNAKTKPREEQYNSTYRVVSVLTVLHQDWLNGKEYKCKV |
| and N4345 mutations | SNKALPAPIEKTISKAKGQPREPQVYTLPPSRDELTKNQVSLWCLVKG |
| | FYPSDIAVEWESYGTEWANYKTTPPVLDSDGSFFLYSKLTVTKEEWQ |
| | QGFVFSCSVLHEALHSHYTQKSLSLSPGK (SEQ ID NO: 2474) |
| Clone CH3C.35.23.2 | APEAAGGPSVFLFPPKPKDTLMISRTPEVTCVVVDVSHEDPEVKFNWY |
| with knob, LALA, | VDGVEVHNAKTKPREEQYNSTYRVVSVLTVLHQDWLNGKEYKCKV |
| and M428L and | SNKALPAPIEKTISKAKGQPREPQVYTLPPSRDELTKNQVSLWCLVKG |
| N434S mutations | FYPSDIAVEWESYGTEWANYKTTPPVLDSDGSFFLYSKLTVTKEEWQ |
| | QGFVFSCSVLHEALHSHYTQKSLSLSPGK (SEQ ID NO: 2475) |
| Clone CH3C.35.23.2 | APEAAGGPSVFLFPPKPKDTLMISRTPEVTCVVVDVSHEDPEVKFNWY |
| with knob, LALAPG, | VDGVEVHNAKTKPREEQYNSTYRVVSVLTVLHQDWLNGKEYKCKV |
| and M428L and | SNKALGAPIEKTISKAKGQPREPQVYTLPPSRDELTKNQVSLWCLVKG |
| N434S mutations | FYPSDIAVEWESYGTEWANYKTTPPVLDSDGSFFLYSKLTVTKEEWQ |
| | QGFVFSCSVLHEALHSHYTQKSLSLSPGK (SEQ ID NO: 2476) |
| Clone CH3C.35.23.2 | APELLGGPSVFLFPPKPKDTLMISRTPEVTCVVVDVSHEDPEVKFNWY |
| with hole and M428L | VDGVEVHNAKTKPREEQYNSTYRVVSVLTVLHQDWLNGKEYKCKV |
| and N4345 mutations | SNKALPAPIEKTISKAKGQPREPQVYTLPPSRDELTKNQVSLSCAVKGF |
| | YPSDIAVEWESYGTEWANYKTTPPVLDSDGSFFLVSKLTVTKEEWQQ |
| | GFVFSCSVLHEALHSHYTQKSLSLSPGK (SEQ ID NO: 2477) |
| Clone CH3C.35.23.2 | APEAAGGPSVFLFPPKPKDTLMISRTPEVTCVVVDVSHEDPEVKFNWY |
| with hole. LALA, and | VDGVEVHNAKTKPREEQYNSTYRVVSVLTVLHQDWLNGKEYKCKV |
| M428L and N434S | SNKALPAPIEKTISKAKGQPREPQVYTLPPSRDELTKNQVSLSCAVKGF |
| mutations | YPSDIAVEWESYGTEWANYKTTPPVLDSDGSFFLVSKLTVTKEEWQQ |
| | GFVFSCSVLHEALHSHYTQKSLSLSPGK (SEQ ID NO: 2478) |
| Clone CH3C.35.23.2 | APEAAGGPSVFLFPPKPKDTLMISRTPEVTCVVVDVSHEDPEVKFNWY |
| with hole, LALAPG, | VDGVEVHNAKTKPREEQYNSTYRVVSVLTVLHQDWLNGKEYKCKV |
| and M428L and | SNKALGAPIEKTISKAKGQPREPQVYTLPPSRDELTKNQVSLSCAVKG |
| N434S mutations | FYPSDIAVEWESYGTEWANYKTTPPVLDSDGSFFLVSKLTVTKEEWQ |
| | QGFVFSCSVLHEALHSHYTQKSLSLSPGK (SEQ ID NO: 2479) |
| Clone | APELLGGPSVFLFPPKPKDTLMISRTPEVTCVVVDVSHEDPEVKFNWY |
| CH3C.35.23.2.1 with | VDGVEVHNAKTKPREEQYNSTYRVVSVLTVLHQDWLNGKEYKCKV |
| M428L and N4345 | SNKALPAPIEKTISKAKGQPREPQVYTLPPSRDELTKNQVSLTCLVKGF |
| mutations | YPSDIAVEWESYGTEWANYKTTPPVLDSDGSFFLYSKLTVSKSEWQQ |
| | GFVFSCSVLHEALHSHYTQKSLSLSPGK (SEQ ID NO: 2480) |
| Clone | APELLGGPSVFLFPPKPKDTLMISRTPEVTCVVVDVSHEDPEVKFNWY |
| CH3C.35.23.2.1 with | VDGVEVHNAKTKPREEQYNSTYRVVSVLTVLHQDWLNGKEYKCKV |
| knob and M428L and | SNKALPAPIEKTISKAKGQPREPQVYTLPPSRDELTKNQVSLWCLVKG |
| N434S mutations | FYPSDIAVEWESYGTEWANYKTTPPVLDSDGSFFLYSKLTVSKSEWQ |
| | QGFVFSCSVLHEALHSHYTQKSLSLSPGK (SEQ ID NO: 2481) |
| Clone | APEAAGGPSVFLFPPKPKDTLMISRTPEVTCVVVDVSHEDPEVKFNWY |
| CH3C.35.23.2.1 with | VDGVEVHNAKTKPREEQYNSTYRVVSVLTVLHQDWLNGKEYKCKV |
| knob, LALA, and | SNKALPAPIEKTISKAKGQPREPQVYTLPPSRDELTKNQVSLWCLVKG |
| M428L and N434 S | FYPSDIAVEWESYGTEWANYKTTPPVLDSDGSFFLYSKLTVSKSEWQ |
| mutations | QGFVFSCSVLHEALHSHYTQKSLSLSPGK (SEQ ID NO: 2482) |
| Clone | APEAAGGPSVFLFPPKPKDTLMISRTPEVTCVVVDVSHEDPEVKFNWY |
| CH3C.35.23.2.1 with | VDGVEVHNAKTKPREEQYNSTYRVVSVLTVLHQDWLNGKEYKCKV |
| knob, LALAPG, and | SNKALGAPIEKTISKAKGQPREPQVYTLPPSRDELTKNQVSLWCLVKG |
| M428L and N434S | FYPSDIAVEWESYGTEWANYKTTPPVLDSDGSFFLYSKLTVSKSEWQ |
| mutations | QGFVFSCSVLHEALHSHYTQKSLSLSPGK (SEQ ID NO: 2483) |
| Clone | APELLGGPSVFLFPPKPKDTLMISRTPEVTCVVVDVSHEDPEVKFNWY |
| CH3C.35.23.2.1 with | VDGVEVHNAKTKPREEQYNSTYRVVSVLTVLHQDWLNGKEYKCKV |
| hole and M428L and | SNKALPAPIEKTISKAKGQPREPQVYTLPPSRDELTKNQVSLSCAVKGF |
| N434S mutations | YPSDIAVEWESYGTEWANYKTTPPVLDSDGSFFLVSKLTVSKSEWQQ |
| | GFVFSCSVLHEALHSHYTQKSLSLSPGK (SEQ ID NO: 2484) |
| Clone | APEAAGGPSVFLFPPKPKDTLMISRTPEVTCVVVDVSHEDPEVKFNWY |
| CH3C.35.23.2.1 with | VDGVEVHNAKTKPREEQYNSTYRVVSVLTVLHQDWLNGKEYKCKV |
| hole, LALA, and | SNKALPAPIEKTISKAKGQPREPQVYTLPPSRDELTKNQVSLSCAVKGF |
| M428L and N434S | YPSDIAVEWESYGTEWANYKTTPPVLDSDGSFFLVSKLTVSKSEWQQ |
| mutations | GFVFSCSVLHEALHSHYTQKSLSLSPGK (SEQ ID NO: 2485) |
| Clone | APEAAGGPSVFLFPPKPKDTLMISRTPEVTCVVVDVSHEDPEVKFNWY |
| CH3C.35.23.2.1 with | VDGVEVHNAKTKPREEQYNSTYRVVSVLTVLHQDWLNGKEYKCKV |
| hole, LALAPG, and | SNKALGAPIEKTISKAKGQPREPQVYTLPPSRDELTKNQVSLSCAVKG |
| M428L and N434S | FYPSDIAVEWESYGTEWANYKTTPPVLDSDGSFFLVSKLTVSKSEWQ |
| mutations | QGFVFSCSVLHEALHSHYTQKSLSLSPGK (SEQ ID NO: 2486) |
| Clone CH3C.35.23.3 | APELLGGPSVFLFPPKPKDTLMISRTPEVTCVVVDVSHEDPEVKFNWY |
| with M428L and | VDGVEVHNAKTKPREEQYNSTYRVVSVLTVLHQDWLNGKEYKCKV |
| N434S mutations | SNKALPAPIEKTISKAKGQPREPQVYTLPPSRDELTKNQVSLTCLVKGF |
| | YPSDIAVEWESYGTEWVNYKTTPPVLDSDGSFFLYSKLTVTKEEWQQ |
| | GFVFSCSVLHEALHSHYTQKSLSLSPGK (SEQ ID NO: 2487) |
| Clone CH3C.35.23.3 | APELLGGPSVFLFPPKPKDTLMISRTPEVTCVVVDVSHEDPEVKFNWY |
| with knob and M428L | VDGVEVHNAKTKPREEQYNSTYRVVSVLTVLHQDWLNGKEYKCKV |
| and N4345 mutations | SNKALPAPIEKTISKAKGQPREPQVYTLPPSRDELTKNQVSLWCLVKG |
| | FYPSDIAVEWESYGTEWVNYKTTPPVLDSDGSFFLYSKLTVTKEEWQ |
| | QGFVFSCSVLHEALHSHYTQKSLSLSPGK (SEQ ID NO: 2488) |
| Clone CH3C.35.23.3 | APEAAGGPSVFLFPPKPKDTLMISRTPEVTCVVVDVSHEDPEVKFNWY |
| with knob, LALA, | VDGVEVHNAKTKPREEQYNSTYRVVSVLTVLHQDWLNGKEYKCKV |
| and M428L and | SNKALPAPIEKTISKAKGQPREPQVYTLPPSRDELTKNQVSLWCLVKG |
| N434S mutations | FYPSDIAVEWESYGTEWVNYKTTPPVLDSDGSFFLYSKLTVTKEEWQ |
| | QGFVFSCSVLHEALHSHYTQKSLSLSPGK (SEQ ID NO: 2489) |
| Clone CH3C.35.23.3 | APEAAGGPSVFLFPPKPKDTLMISRTPEVTCVVVDVSHEDPEVKFNWY |
| with knob, LALAPG, | VDGVEVHNAKTKPREEQYNSTYRVVSVLTVLHQDWLNGKEYKCKV |
| and M428L and | SNKALGAPIEKTISKAKGQPREPQVYTLPPSRDELTKNQVSLWCLVKG |
| N434S mutations | FYPSDIAVEWESYGTEWVNYKTTPPVLDSDGSFFLYSKLTVTKEEWQ |
| | QGFVFSCSVLHEALHSHYTQKSLSLSPGK (SEQ ID NO: 2490) |
| Clone CH3C.35.23.3 | APELLGGPSVFLFPPKPKDTLMISRTPEVTCVVVDVSHEDPEVKFNWY |
| with hole and M428L | VDGVEVHNAKTKPREEQYNSTYRVVSVLTVLHQDWLNGKEYKCKV |
| and N4345 mutations | SNKALPAPIEKTISKAKGQPREPQVYTLPPSRDELTKNQVSLSCAVKGF |
| | YPSDIAVEWESYGTEWVNYKTTPPVLDSDGSFFLVSKLTVTKEEWQQ |
| | GFVFSCSVLHEALHSHYTQKSLSLSPGK (SEQ ID NO: 2491) |
| Clone CH3C.35.23.3 | APEAAGGPSVFLFPPKPKDTLMISRTPEVTCVVVDVSHEDPEVKFNWY |
| with hole. LALA, and | VDGVEVHNAKTKPREEQYNSTYRVVSVLTVLHQDWLNGKEYKCKV |
| M428L and N4345 | SNKALPAPIEKTISKAKGQPREPQVYTLPPSRDELTKNQVSLSCAVKGF |
| mutations | YPSDIAVEWESYGTEWVNYKTTPPVLDSDGSFFLVSKLTVTKEEWQQ |
| | GFVFSCSVLHEALHSHYTQKSLSLSPGK (SEQ ID NO: 2492) |
| Clone CH3C.35.23.3 | APEAAGGPSVFLFPPKPKDTLMISRTPEVTCVVVDVSHEDPEVKFNWY |
| with hole, LALAPG, | VDGVEVHNAKTKPREEQYNSTYRVVSVLTVLHQDWLNGKEYKCKV |
| and M428L and | SNKALGAPIEKTISKAKGQPREPQVYTLPPSRDELTKNQVSLSCAVKG |
| N434S mutations | FYPSDIAVEWESYGTEWVNYKTTPPVLDSDGSFFLVSKLTVTKEEWQ |
| | QGFVFSCSVLHEALHSHYTQKSLSLSPGK (SEQ ID NO: 2493) |
| Clone CH3C.35.23.4 | APELLGGPSVFLFPPKPKDTLMISRTPEVTCVVVDVSHEDPEVKFNWY |
| with M428L and | VDGVEVHNAKTKPREEQYNSTYRVVSVLTVLHQDWLNGKEYKCKV |
| N434S mutations | SNKALPAPIEKTISKAKGQPREPQVYTLPPSRDELTKNQVSLTCLVKGF |
| | YPSDIAVEWESYGTEWSNYKTTPPVLDSDGSFFLYSKLTVSKEEWQQ |
| | GFVFSCSVLHEALHSHYTQKSLSLSPGK (SEQ ID NO: 2494) |
| Clone CH3C.35.23.4 | APELLGGPSVFLFPPKPKDTLMISRTPEVTCVVVDVSHEDPEVKFNWY |
| with knob and M428L | VDGVEVHNAKTKPREEQYNSTYRVVSVLTVLHQDWLNGKEYKCKV |
| and N4345 mutations | SNKALPAPIEKTISKAKGQPREPQVYTLPPSRDELTKNQVSLWCLVKG |
| | FYPSDIAVEWESYGTEWSNYKTTPPVLDSDGSFFLYSKLTVSKEEWQQ |
| | GFVFSCSVLHEALHSHYTQKSLSLSPGK (SEQ ID NO: 2495) |
| Clone CH3C.35.23.4 | APEAAGGPSVFLFPPKPKDTLMISRTPEVTCVVVDVSHEDPEVKFNWY |
| with knob, LALA, | VDGVEVHNAKTKPREEQYNSTYRVVSVLTVLHQDWLNGKEYKCKV |
| and M428L and | SNKALPAPIEKTISKAKGQPREPQVYTLPPSRDELTKNQVSLWCLVKG |
| N434S mutations | FYPSDIAVEWESYGTEWSNYKTTPPVLDSDGSFFLYSKLTVSKEEWQQ |
| | GFVFSCSVLHEALHSHYTQKSLSLSPGK (SEQ ID NO: 2496) |
| Clone CH3C.35.23.4 | APEAAGGPSVFLFPPKPKDTLMISRTPEVTCVVVDVSHEDPEVKFNWY |
| with knob, LALAPG, | VDGVEVHNAKTKPREEQYNSTYRVVSVLTVLHQDWLNGKEYKCKV |
| and M428L and | SNKALGAPIEKTISKAKGQPREPQVYTLPPSRDELTKNQVSLWCLVKG |
| N434S mutations | FYPSDIAVEWESYGTEWSNYKTTPPVLDSDGSFFLYSKLTVSKEEWQQ |
| | GFVFSCSVLHEALHSHYTQKSLSLSPGK (SEQ ID NO: 2497) |
| Clone CH3C.35.23.4 | APELLGGPSVFLFPPKPKDTLMISRTPEVTCVVVDVSHEDPEVKFNWY |
| with hole and M428L | VDGVEVHNAKTKPREEQYNSTYRVVSVLTVLHQDWLNGKEYKCKV |
| and N4345 mutations | SNKALPAPIEKTISKAKGQPREPQVYTLPPSRDELTKNQVSLSCAVKGF |
| | YPSDIAVEWESYGTEWSNYKTTPPVLDSDGSFFLVSKLTVSKEEWQQ |
| | GFVFSCSVLHEALHSHYTQKSLSLSPGK (SEQ ID NO: 2498) |
| Clone CH3C.35.23.4 | APEAAGGPSVFLFPPKPKDTLMISRTPEVTCVVVDVSHEDPEVKFNWY |
| with hole, LALA, and | VDGVEVHNAKTKPREEQYNSTYRVVSVLTVLHQDWLNGKEYKCKV |
| M428L and N4345 | SNKALPAPIEKTISKAKGQPREPQVYTLPPSRDELTKNQVSLSCAVKGF |
| mutations | YPSDIAVEWESYGTEWSNYKTTPPVLDSDGSFFLVSKLTVSKEEWQQ |
| | GFVFSCSVLHEALHSHYTQKSLSLSPGK (SEQ ID NO: 2499) |
| Clone CH3C.35.23.4 | APEAAGGPSVFLFPPKPKDTLMISRTPEVTCVVVDVSHEDPEVKFNWY |
| with hole, LALAPG, | VDGVEVHNAKTKPREEQYNSTYRVVSVLTVLHQDWLNGKEYKCKV |
| and M428L and | SNKALGAPIEKTISKAKGQPREPQVYTLPPSRDELTKNQVSLSCAVKG |
| N434S mutations | FYPSDIAVEWESYGTEWSNYKTTPPVLDSDGSFFLVSKLTVSKEEWQQ |
| | GFVFSCSVLHEALHSHYTQKSLSLSPGK (SEQ ID NO: 2500) |
| Fc sequence with hole | APELLGGPSVFLFPPKPKDTLMISRTPEVTCVVVDVSHEDPEVKFNWY |
| and M428L and | VDGVEVHNAKTKPREEQYNSTYRVVSVLTVLHQDWLNGKEYKCKV |
| N434S mutations | SNKALPAPIEKTISKAKGQPREPQVYTLPPSRDELTKNQVSLSCAVKGF |
| | YPSDIAVEWESNGQPENNYKTTPPVLDSDGSFFLVSKLTVDKSRWQQ |
| | GNVFSCSVLHEALHSHYTQKSLSLSPGK (SEQ ID NO: 2501) |
| Fc sequence with | APEAAGGPSVFLFPPKPKDTLMISRTPEVTCVVVDVSHEDPEVKFNWY |
| hole, LALA, and | VDGVEVHNAKTKPREEQYNSTYRVVSVLTVLHQDWLNGKEYKCKV |
| M428L and N4345 | SNKALPAPIEKTISKAKGQPREPQVYTLPPSRDELTKNQVSLSCAVKGF |
| mutations | YPSDIAVEWESNGQPENNYKTTPPVLDSDGSFFLVSKLTVDKSRWQQ |
| | GNVFSCSVLHEALHSHYTQKSLSLSPGK (SEQ ID NO: 2502) |
| Fc sequence with | APELLGGPSVFLFPPKPKDTLMISRTPEVTCVVVDVSHEDPEVKFNWY |
| knob and M428L and | VDGVEVHNAKTKPREEQYNSTYRVVSVLTVLHQDWLNGKEYKCKV |
| N434S mutations | SNKALPAPIEKTISKAKGQPREPQVYTLPPSRDELTKNQVSLWCLVKG |
| | FYPSDIAVEWESNGQPENNYKTTPPVLDSDGSFFLYSKLTVDKSRWQ |
| | QGNVFSCSVLHEALHSHYTQKSLSLSPGK (SEQ ID NO: 2503) |
| Fc sequence with | APEAAGGPSVFLFPPKPKDTLMISRTPEVTCVVVDVSHEDPEVKFNWY |
| knob, LALA, and | VDGVEVHNAKTKPREEQYNSTYRVVSVLTVLHQDWLNGKEYKCKV |
| M428L and N434S | SNKALPAPIEKTISKAKGQPREPQVYTLPPSRDELTKNQVSLWCLVKG |
| mutations | FYPSDIAVEWESNGQPENNYKTTPPVLDSDGSFFLYSKLTVDKSRWQ |
| | QGNVFSCSVLHEALHSHYTQKSLSLSPGK (SEQ ID NO: 2504) |
| SS2_NHis_TREM2 | MPALLSLVSLLSVLLMGCVAETGGSGHHHHHHSGTHNTTVFQGVAG |
| | QSLQVSCPYDSMIKHWGRRKAWCRQLGEKGPCQRVVSTHNLWLLSFL |
| | RRWNGSTAITDDTLGGTLTITLRNLQPHDAGLYQCQSLHGSEADTLR |
| | KVLVEVLADPLDHRDAGDLWFPGESESFEDAHVEHSISRSLLEGEIPFP |
| | PTSAS (SEQ ID NO: 2505) |

[0448] In some embodiments, each of the light chain variable regions and each of the heavy chain variable regions disclosed in in the above tables as well as specific combinations thereof and other embodiments of the anti-TREM2 antibody described in the '841 application and herein may be attached to the light chain constant regions (TABLE EN1) and heavy chain constant regions (TABLE EN2) to form complete antibody light and heavy chains, respectively, as further discussed below. Further, each of the generated heavy and light chain sequences may be combined to form a complete antibody structure. It should be understood that the heavy chain and light chain variable regions provided herein can also be attached to other constant domains having different sequences than the exemplary sequences listed herein.

H. PCT Patent Application Publication No. WO2019/118513A1

[0449] In some embodiments, the TREM2 agonist is an antibody or an antigen-binding fragment thereof, as described in PCT Patent Application Publication No. WO2019/118513A1 (“the '513 application”), which is incorporated by reference herein, in its entirety.

[0450] In some embodiments, the TREM2 binding agent comprises an antibody that comprises a light chain variable domain comprising a CDRL1, CDRL2, and CDRL3, and a heavy chain variable domain comprising a CDRH1, CDRH2, and CDRH3 disclosed in the '513 application specification. In some embodiments, the TREM2 binding agent comprises an antibody that comprises a light chain variable domain and a heavy chain variable domain disclosed in the '513 application specification.

[0451] In some embodiments, the antibody comprises a CDR-H1 comprising the sequence set forth in SEQ ID NO:2514, a CDR-H2 comprising the sequence set forth in SEQ ID NO:2515, a CDR-H3 comprising the sequence set forth in SEQ ID NO: 11, a CDR-L1 comprising the sequence set forth in SEQ ID NO:2517, a CDR-L2 comprising the sequence set forth in SEQ ID NO:2518, and a CDR-L3 comprising the sequence set forth in SEQ ID NO:2519.

[0452] In some embodiments, the antibody is afucosylated and comprises the VH sequence shown in SEQ ID NO:2506; the VL sequence shown in SEQ ID NO:2507; and an active human IgG1 Fc region.

[0453] In some embodiments, the antibody comprises all 3 heavy chain CDRs of the sequence shown in SEQ ID NO:2512 and all 3 light chain CDRs of the sequence shown in SEQ ID NO:2513.

[0454] In some embodiments, the antibody comprises an A to T substitution at position 97 of the sequence shown in SEQ ID NO:2512; and a K to R substitution at position 98 of the sequence shown in SEQ ID NO:2512.

[0455] In some embodiments, the antibody comprises the VH sequence shown in SEQ ID NO:2506, 2508, or 2510.

[0456] In some embodiments, the antibody comprises the VH sequence shown in SEQ ID NO:2506, 2508, or 2510 and the VL sequence shown in SEQ ID NO:2507, 2509, or 2511. In some embodiments, the antibody comprises the VH sequence shown in SEQ ID NO:2506.

[0457] In some embodiments, the antibody comprises the VH sequence shown in SEQ ID NO:2506 and the VL sequence shown in SEQ ID NO:2507.

[0458] In some embodiments, the antibody is the 37012 antibody (see TABLE H1)

[0459] In some embodiments, the antibody is an antibody having a VL, VH, full heavy chain sequence or full light chain sequence disclosed in Table 1A or a CDR sequence as disclosed in Table 1B of PCT Patent Application Publication No. WO2019/118513A1, which are reproduced below as TABLES H1 and H2 respectively.

TABLE H1

| Name | Sequence |
|---|---|
| 37012 VH | EVQLLESGGGLVQPGGSLRLSCAASGFTFSNYYMAWVRQAPGKGLEW |
| | VSSLTNSGGSTYYADSVKGRFTISRDNSKNTLYLQMNSLRAEDTAVYY |
| | CTREWAGSGYFDYWGQGTLVTVSS (SEQ ID NO: 2506) |
| 37012 VL | DIQMTQSPSSLSASVGDRVTITCKASQNVGNNLAWYQQKPGKAPKLLIY |
| | YTSNRFTGVPSRFSGSGSGTDFTLTISSLQPEDFATYYCQRIYNSPWTFG |
| | QGTKLEIK (SEQ ID NO: 2507) |
| 37013VH | EVQLLESGGGLVQPGGSLRLSCAASGFTFSNYYMAWVRQAPGKGLEW |
| | VSSLTNSGGSTYYADSVKGRFTISRDNSKNTLYLQMNSLRAEDTAVYY |
| | CTREWAGSGYFDYWGQGTLVTVSS (SEQ ID NO: 2508) |
| 37013VL | DIQMTQSPSSLSASVGDRVTMTCKASQNVGNNLAWYQQKPGKAPKLL |
| | LYYTSNRFTGVPSRFSGSGSGTDFTLTISSVQPEDFATYYCQRIYNSPWT |
| | FGQGTKLELK (SEQ ID NO: 2509) |
| 37014VH | EVQLLESGGGLVQPGGSLRLSCAASGFTFSNYYMAWVRQAPGKGLEW |
| | VASLTNSGGSTYYADSVKGRFTLSRDNSKNTLYLQMNSLRAEDTAVYY |
| | CTREWAGSGYFDYWGQGTLVTVSS (SEQ ID NO: 2510) |
| 37014VL | DIQMTQSPSSLSASVGDRVTITCKASQNVGNNLAWYQQKPGKAPKLLIY |
| | YTSNRFTGVPSRFSGSGSGTDFTLTISSLQPEDFATYYCQRIYNSPWTFG |
| | QGTKLEIK (SEQ ID NO: 2511) |
| 37017VH | EVQLLESGGGLVQPGGSLRLSCAASGFTFSNYYMAWVRQAPGKGLEW |
| | VSSLTNSGGSTYYADSVKGRFTISRDNSKNTLYLQMNSLRAEDTAVYY |
| | CAKEWAGSGYFDYWGQGTLVTVSS (SEQ ID NO: 2512) |
| 37017VL | DIQMTQSPSSLSASVGDRVTITCKASQNVGNNLAWYQQKPGKAPKLLIY |
| | YTSNRFTGVPSRFSGSGSGTDFTLTISSLQPEDFATYYCQRIYNSPWTFG |
| | QGTKLEIK (SEQ ID NO: 2513) |
| Full 37012_H | EVQLLESGGGLVQPGGSLRLSCAASGFTFSNYYMAWVRQAPGKGLEW |
| | VSSLTNSGGSTYYADSVKGRFTISRDNSKNTLYLQMNSLRAEDTAVYY |
| | CTREWAGSGYFDYWGQGTLVTVSSASTKGPSVFPLAPSSKSTSGGTAA |
| | LGCLVKDYFPEPVTVSWNSGALTSGVHTFPAVLQSSGLYSLSSVVTVPS |
| | SSLGTQTYICNVNHKPSNTKVDKKVEPKSCDKTHTCPPCPAPELLGGPS |
| | VFLFPPKPKDTLMISRTPEVTCVVVDVSHEDPEVKFNWYVDGVEVHNA |
| | KTKPREEQYNSTYRVVSVLTVLHQDWLNGKEYKCKVSNKALPAPIEKT |
| | ISKAKGQPREPQVYTLPPSRDELTKNQVSLTCLVKGFYPSDIAVEWESN |
| | GQPENNYKTTPPVLDSDGSFFLYSKLTVDKSRWQQGNVFSCSVMHEAL |
| | HNHYTQKSLSLSPGK (SEQ ID NO: 2529) |
| Full 37012 L | DIQMTQSPSSLSASVGDRVTITCKASQNVGNNLAWYQQKPGKAPKLLIY |
| | YTSNRFTGVPSRFSGSGSGTDFTLTISSLQPEDFATYYCQRIYNSPWTFG |
| | QGTKLEIKRTVAAPSVFIFPPSDEQLKSGTASVVCLLNNFYPREAKVQW |
| | KVDNALQSGNSQESVTEQDSKDSTYSLSSTLTLSKADYEKHKVYACEV |
| | THQGLSSPVTKSFNRGEC (SEQ ID NO: 2530) |
| Full 37013_H | EVQLLESGGGLVQPGGSLRLSCAASGFTFSNYYMAWVRQAPGKGLEW |
| | VSSLTNSGGSTYYADSVKGRFTISRDNSKNTLYLQMNSLRAEDTAVYY |
| | CTREWAGSGYFDYWGQGTLVTVSSASTKGPSVFPLAPSSKSTSGGTAA |
| | LGCLVKDYFPEPVTVSWNSGALTSGVHTFPAVLQSSGLYSLSSVVTVPS |
| | SSLGTQTYICNVNHKPSNTKVDKKVEPKSCDKTHTCPPCPAPELLGGPS |
| | VFLFPPKPKDTLMISRTPEVTCVVVDVSHEDPEVKFNWYVDGVEVHNA |
| | KTKPREEQYNSTYRVVSVLTVLHQDWLNGKEYKCKVSNKALPAPIEKT |
| | ISKAKGQPREPQVYTLPPSRDELTKNQVSLTCLVKGFYPSDIAVEWESN |
| | GQPENNYKTTPPVLDSDGSFFLYSKLTVDKSRWQQGNVFSCSVMHEAL |
| | HNHYTQKSLSLSPGK (SEQ ID NO: 2531) |
| Full 37013 L | DIQMTQSPSSLSASVGDRVTMTCKASQNVGNNLAWYQQKPGKAPKLL |
| | LYYTSNRFTGVPSRFSGSGSGTDFTLTISSVQPEDFATYYCQRIYNSPWT |
| | FGQGTKLELKRTVAAPSVFIFPPSDEQLKSGTASVVCLLNNFYPREAKV |
| | QWKVDNALQSGNSQESVTEQDSKDSTYSLSSTLTLSKADYEKHKVYAC |
| | EVTHQGLSSPVTKSFNRGEC (SEQ ID NO: 2532) |
| Full 37017_H | EVQLLESGGGLVQPGGSLRLSCAASGFTFSNYYMAWVRQAPGKGLEW |
| | VASLTNSGGSTYYADSVKGRFTLSRDNSKNTLYLQMNSLRAEDTAVYY |
| | CTREWAGSGYFDYWGQGTLVTVSSASTKGPSVFPLAPSSKSTSGGTAA |
| | LGCLVKDYFPEPVTVSWNSGALTSGVHTFPAVLQSSGLYSLSSVVTVPS |
| | SSLGTQTYICNVNHKPSNTKVDKKVEPKSCDKTHTCPPCPAPELLGGPS |
| | VFLFPPKPKDTLMISRTPEVTCVVVDVSHEDPEVKFNWYVDGVEVHNA |
| | KTKPREEQYNSTYRVVSVLTVLHQDWLNGKEYKCKVSNKALPAPIEKT |
| | ISKAKGQPREPQVYTLPPSRDELTKNQVSLTCLVKGFYPSDIAVEWESN |
| | GQPENNYKTTPPVLDSDGSFFLYSKLTVDKSRWQQGNVFSCSVMHEAL |
| | HNHYTQKSLSLSPGK (SEQ ID NO: 2533) |
| Full 37017_L | DIQMTQSPSSLSASVGDRVTITCKASQNVGNNLAWYQQKPGKAPKLLIY |
| | YTSNRFTGVPSRFSGSGSGTDFTLTISSLQPEDFATYYCQRIYNSPWTFG |
| | QGTKLEIKRTVAAPSVFIFPPSDEQLKSGTASVVCLLNNFYPREAKVQW |
| | KVDNALQSGNSQESVTEQDSKDSTYSLSSTLTLSKADYEKHKVYACEV |
| | THQGLSSPVTKSFNRGEC (SEQ ID NO: 2534) |
| Full 37017_H | EVQLLESGGGLVQPGGSLRLSCAASGFTFSNYYMAWVRQAPGKGLEW |
| | VSSLTNSGGSTYYADSVKGRFTISRDNSKNTLYLQMNSLRAEDTAVYY |
| | CAKEWAGSGYFDYWGQGTLVTVSSASTKGPSVFPLAPSSKSTSGGTAA |
| | LGCLVKDYFPEPVTVSWNSGALTSGVHTFPAVLQSSGLYSLSSVVTVPS |
| | SSLGTQTYICNVNHKPSNTKVDKKVEPKSCDKTHTCPPCPAPELLGGPS |
| | VFLFPPKPKDTLMISRTPEVTCVVVDVSHEDPEVKFNWYVDGVEVHNA |
| | KTKPREEQYNSTYRVVSVLTVLHQDWLNGKEYKCKVSNKALPAPIEKT |
| | ISKAKGQPREPQVYTLPPSRDELTKNQVSLTCLVKGFYPSDIAVEWESN |
| | GQPENNYKTTPPVLDSDGSFFLYSKLTVDKSRWQQGNVFSCSVMHEAL |
| | HNHYTQKSLSLSPGK (SEQ ID NO: 2535) |
| Full 37017_L | DIQMTQSPSSLSASVGDRVTITCKASQNVGNNLAWYQQKPGKAPKLLIY |
| | YTSNRFTGVPSRFSGSGSGTDFTLTISSLQPEDFATYYCQRIYNSPWTFG |
| | QGTKLEIKRTVAAPSVFIFPPSDEQLKSGTASVVCLLNNFYPREAKVQW |
| | KVDNALQSGNSQESVTEQDSKDSTYSLSSTLTLSKADYEKHKVYACEV |
| | THQGLSSPVTKSFNRGEC (SEQ ID NO: 2536) |

TABLE H2
CDR's of humanized antibodies

| CDR | Sequence |
|---|---|
| CDR-H1 | FSNYYMA (SEQ ID NO: 2514) |
| CDR-H2 | SLTNSGGSTY (SEQ ID NO: 2515) |
| CDR-H3 | EWAGSGY (SEQ ID NO: 2516) |
| CDR-L1 | NVGNNLA (SEQ ID NO: 2517) |
| CDR-L2 | YTSNRFT (SEQ ID NO: 2518) |
| CDR-L3 | RIYNSPW (SEQ ID NO: 2519) |

[0460] In some embodiments, each of the light chain variable regions and each of the heavy chain variable regions disclosed in in the above tables as well as specific combinations thereof and other embodiments of the anti-TREM2 antibody described in the '513 application and herein may be attached to the light chain constant regions (TABLE EN1) and heavy chain constant regions (TABLE EN2) to form complete antibody light and heavy chains, respectively, as further discussed below. Further, each of the generated heavy and light chain sequences may be combined to form a complete antibody structure. It should be understood that the heavy chain and light chain variable regions provided herein can also be attached to other constant domains having different sequences than the exemplary sequences listed herein.

I. PCT Patent Application Publication No. WO2020/055975A1

[0461] In some embodiments, the TREM2 agonist is an antibody or an antigen-binding fragment thereof, as described in PCT Patent Application Publication No. WO2020/055975A1 (“the '975 application”), which is incorporated by reference herein, in its entirety.

[0462] In some embodiments, the TREM2 binding agent comprises an antibody that comprises a light chain variable domain comprising a CDRL1, CDRL2, and CDRL3, and a heavy chain variable domain comprising a CDRH1, CDRH2, and CDRH3 disclosed in the '975 application specification. In some embodiments, the TREM2 binding agent comprises an antibody that comprises a light chain variable domain and a heavy chain variable domain disclosed in the '975 application specification.

[0463] In some embodiments, the antibody comprises (a) a light chain variable region comprising an L1 derived from SEQ ID NO:2539, an L2 derived from SEQ ID NO:2539, an L3 derived from of SEQ ID NO:2539, or any combination thereof; and/or (b) a heavy chain variable region comprising an H1 derived from SEQ ID NO:2540, an H2 derived from SEQ ID NO:2540, an H3 derived from SEQ ID NO:2540, or any combination thereof.

[0464] In some embodiments, the antibody comprises (a) a light chain variable region comprising an L1 of SEQ ID NO:2541, an L2 comprising the amino acid sequence IVS, an L3 of SEQ ID NO:2542, or any combination thereof; and/or (b) a heavy chain variable region comprising an H1 comprising SEQ ID NO:2543, an H2 comprising SEQ ID NO:2544, an H3 comprising SEQ ID NO:2545, or any combination thereof.

[0465] In some embodiments, the antibody comprises (a) a light chain variable region comprising an L1 derived from SEQ ID NO:2546, an L2 derived from SEQ ID NO:2546, an L3 derived from of SEQ ID NO:2546, or any combination thereof; and/or (b) a heavy chain variable region comprising an H1 derived from SEQ ID NO:2547, an H2 derived from SEQ ID NO:2547, an H3 derived from of SEQ ID NO:2547, or any combination thereof.

[0466] In some embodiments, the antibody comprises (a) a light chain variable region comprising an L1 of SEQ ID NO:2548, an L2 comprising the amino acid sequence KVS, an L3 of SEQ ID NO:2549, or any combination thereof; and/or (b) a heavy chain variable region comprising an H1 comprising SEQ ID NO:2550, an H2 comprising SEQ ID NO:2551, an H3 comprising SEQ ID NO:2552, or any combination thereof.

[0467] In some embodiments, the antibody comprises (a) a light chain variable region comprising an L1 derived from SEQ ID NO:2553, an L2 derived from SEQ ID NO:2553, an L3 derived from of SEQ ID NO:2553, or any combination thereof; and/or (b) a heavy chain variable region comprising an H1 derived from SEQ ID NO:2554, an H2 derived from SEQ ID NO:2554, an H3 derived from of SEQ ID NO:2554, or any combination thereof.

[0468] In some embodiments, the antibody comprises (a) a light chain variable region comprising an L1 of SEQ ID NO:2555, an L2 comprising the amino acid sequence KVS, an L3 of SEQ ID NO:2556, or any combination thereof; and/or (b) a heavy chain variable region comprising an H1 comprising SEQ ID NO:2557, an H2 comprising SEQ ID NO:2558, an H3 comprising SEQ ID NO:2559, or any combination thereof.

[0469] In some embodiments, the antibody comprises (a) a light chain variable region comprising an L1 derived from SEQ ID NO:2560, an L2 derived from SEQ ID NO:2560, an L3 derived from of SEQ ID NO:2560, or any combination thereof; and/or (b) a heavy chain variable region comprising an H1 derived from SEQ ID NO:2561, an H2 derived from SEQ ID NO:2561, an H3 derived from of SEQ ID NO:2561, or any combination thereof.

[0470] In some embodiments, the antibody comprises (a) a light chain variable region comprising an L1 of SEQ ID NO:2562, an L2 comprising the amino acid sequence KVS, an L3 of SEQ ID NO:2563, or any combination thereof; and/or (b) a heavy chain variable region comprising an H1 comprising SEQ ID NO:2564, an H2 comprising SEQ ID NO:2565, an H3 comprising SEQ ID NO:2566, or any combination thereof.

[0471] In some embodiments, the antibody comprises (a) a light chain variable region comprising an L1 derived from SEQ ID NO:2567, an L2 derived from SEQ ID NO:2567, an L3 derived from of SEQ ID NO:2567, or any combination thereof; and/or (b) a heavy chain variable region comprising an H1 derived from SEQ ID NO:2568, an H2 derived from SEQ ID NO:2568, an H3 derived from of SEQ ID NO:2568, or any combination thereof. Compositions comprising the antibody, including but not limited to pharmaceutical compositions, are contemplated herein. In certain embodiments the antibody is a humanized antibody.

[0472] In some embodiments, the antibody comprises (a) a light chain variable region comprising an L1 of SEQ ID NO:2569, an L2 comprising the amino acid sequence KVS, an L3 of SEQ ID NO:2570, or any combination thereof; and/or (b) a heavy chain variable region comprising an H1 comprising SEQ ID NO:2571, an H2 comprising SEQ ID NO:2572, an H3 comprising SEQ ID NO:2573, or any combination thereof.

[0473] In some embodiments, the antibody comprises (a) a light chain variable region comprising an L1 derived from SEQ ID NO:2574, an L2 derived from SEQ ID NO:2574, an L3 derived from of SEQ ID NO:2574, or any combination thereof; and/or (b) a heavy chain variable region comprising an H1 derived from SEQ ID NO:2575, an H2 derived from SEQ ID NO:2575, an H3 derived from of SEQ ID NO:2575, or any combination thereof.

[0474] In some embodiments, the antibody comprises (a) a light chain variable region comprising an L1 of SEQ ID NO:2576, an L2 comprising the amino acid sequence WAS, an L3 of SEQ ID NO:2577, or any combination thereof; and/or (b) a heavy chain variable region comprising an H1 comprising SEQ ID NO:2578, an H2 comprising SEQ ID NO:2579, an H3 comprising SEQ ID NO:2580, or any combination thereof.

[0475] In some embodiments, the antibody is HJ23.4, HJ23.7, HJ23.8, HJ23.9, HJ23.10, or HJ23.13. In some embodiments, the antibody is a humanized antibody derived from HJ23.4, HJ23.7, HJ23.8, HJ23.9, HJ23.10, or HJ23.13. The accession number for the hybridoma that produced antibodies HJ23.4, HJ23.7, HJ23.8, HJ23.9, HJ23.10, and HJ23.13, and their respective light chain variable and heavy chain variable regions are noted in TABLE I1:

TABLE I1

| Antibody (ATCC # | Light chain | Heavy chain |
|---|---|---|
| of the hybridoma) | variable region | variable region |
| HJ23.4 (PTA-125168) | SEQ ID NO: 2539 | SEQ ID NO: 2540 |
| HJ23.7 (PTA-125169) | SEQ ID NO: 2546 | SEQ ID NO: 2547 |
| HJ23.8 (PTA-125170) | SEQ ID NO: 2552 | SEQ ID NO: 2553 |
| HJ23.9 (PTA-125171) | SEQ ID NO: 2561 | SEQ ID NO: 2562 |
| HJ23.10 (PTA-125172) | SEQ ID NO: 2567 | SEQ ID NO: 2568 |
| HJ23.13 (PTA-125173) | SEQ ID NO: 2574 | SEQ ID NO: 2575 |

[0476] In some embodiments, the antibody is an antibody disclosed in Tables A and B or the summary table appended to Example 2 of PCT Patent Application Publication No. WO2020/055975A1, reproduced below as TABLES I2-4.

TABLE I2

| | Light Chain HVR | | | Heavy Chain HVR | | |
|---|---|---|---|---|---|---|
| Antibody | L1 | L2 | L3 | H1 | H2 | H3 |
| 1 | SEQ ID NO: 2541 | | | | | |
| 2 | SEQ ID NO: 2541 | IVS | | | | |
| 3 | SEQ ID NO: 2541 | IVS | SEQ ID NO: 2542 | | | |
| 4 | | IVS | | | | |
| 5 | | IVS | SEQ ID NO: 2542 | | | |
| 6 | | | SEQ ID NO: 2542 | | | |
| 7 | SEQ ID NO: 2541 | | SEQ ID NO: 2542 | | | |
| 8 | | | | SEQ ID NO: 2543 | | |
| 9 | | | | SEQ ID NO: 2543 | SEQ ID NO: 2544 | |
| 10 | | | | SEQ ID NO: 2543 | SEQ ID NO: 2544 | SEQ ID NO: 2545 |
| 11 | | | | | SEQ ID NO: 2544 | |
| 12 | | | | | SEQ ID NO: 2544 | SEQ ID NO: 2545 |
| 13 | | | | | | SEQ ID NO: 2545 |
| 14 | | | | SEQ ID NO: 2543 | | SEQ ID NO: 2545 |
| 15 | SEQ ID NO: 2541 | | | SEQ ID NO: 2543 | | |
| 16 | SEQ ID NO: 2541 | | | SEQ ID NO: 2543 | SEQ ID NO: 2544 | |
| 17 | SEQ ID NO: 2541 | | | SEQ ID NO: 2543 | SEQ ID NO: 2544 | SEQ ID NO: 2545 |
| 18 | SEQ ID NO: 2541 | | | | SEQ ID NO: 2544 | |
| 19 | SEQ ID NO: 2541 | | | | SEQ ID NO: 2544 | SEQ ID NO: 2545 |
| 20 | SEQ ID NO: 2541 | | | | | SEQ ID NO: 2545 |
| 21 | SEQ ID NO: 2541 | | | SEQ ID NO: 2543 | | SEQ ID NO: 2545 |
| 22 | SEQ ID NO: 2541 | IVS | | SEQ ID NO: 2543 | | |
| 23 | SEQ ID NO: 2541 | IVS | | SEQ ID NO: 2543 | SEQ ID NO: 2544 | |
| 24 | SEQ ID NO: 2541 | IVS | | SEQ ID NO: 2543 | SEQ ID NO: 2544 | SEQ ID NO: 2545 |
| 25 | SEQ ID NO: 2541 | IVS | | | SEQ ID NO: 2544 | |
| 26 | SEQ ID NO: 2541 | IVS | | | SEQ ID NO: 2544 | SEQ ID NO: 2545 |
| 27 | SEQ ID NO: 2541 | IVS | | | | SEQ ID NO: 2545 |
| 28 | SEQ ID NO: 2541 | IVS | | SEQ ID NO: 2543 | | SEQ ID NO: 2545 |
| 29 | SEQ ID NO: 2541 | IVS | SEQ ID NO: 2542 | SEQ ID NO: 2543 | | |
| 30 | SEQ ID NO: 2541 | IVS | SEQ ID NO: 2542 | SEQ ID NO: 2543 | SEQ ID NO: 2544 | |
| 31 | SEQ ID NO: 2541 | IVS | SEQ ID NO: 2542 | SEQ ID NO: 2543 | SEQ ID NO: 2544 | SEQ ID NO: 2545 |
| 32 | SEQ ID NO: 2541 | IVS | SEQ ID NO: 2542 | | SEQ ID NO: 2544 | |
| 33 | SEQ ID NO: 2541 | IVS | SEQ ID NO: 2542 | | SEQ ID NO: 2544 | SEQ ID NO: 2545 |
| 34 | SEQ ID NO: 2541 | IVS | SEQ ID NO: 2542 | SEQ ID NO: 2543 | | SEQ ID NO: 2545 |
| 35 | SEQ ID NO: 2541 | IVS | SEQ ID NO: 2542 | | | SEQ ID NO: 2545 |
| 36 | | IVS | | SEQ ID NO: 2543 | | |
| 37 | | IVS | | SEQ ID NO: 2543 | SEQ ID NO: 2544 | |
| 38 | | IVS | | SEQ ID NO: 2543 | SEQ ID NO: 2544 | SEQ ID NO: 2545 |
| 39 | | IVS | | | SEQ ID NO: 2544 | |
| 40 | | IVS | | | SEQ ID NO: 2544 | SEQ ID NO: 2545 |
| 41 | | IVS | | | | SEQ ID NO: 2545 |
| 42 | | IVS | | SEQ ID NO: 2543 | | SEQ ID NO: 2545 |
| 43 | | IVS | SEQ ID NO: 2542 | SEQ ID NO: 2543 | | |
| 44 | | IVS | SEQ ID NO: 2542 | SEQ ID NO: 2543 | SEQ ID NO: 2544 | |
| 45 | | IVS | SEQ ID NO: 2542 | SEQ ID NO: 2543 | SEQ ID NO: 2544 | SEQ ID NO: 2545 |
| 46 | | IVS | SEQ ID NO: 2542 | | SEQ ID NO: 2544 | |
| 47 | | IVS | SEQ ID NO: 2542 | | SEQ ID NO: 2544 | SEQ ID NO: 2545 |
| 48 | | IVS | SEQ ID NO: 2542 | | | SEQ ID NO: 2545 |
| 49 | | IVS | SEQ ID NO: 2542 | SEQ ID NO: 2543 | | SEQ ID NO: 2545 |
| 50 | | | SEQ ID NO: 2542 | SEQ ID NO: 2543 | | |
| 51 | | | SEQ ID NO: 2542 | SEQ ID NO: 2543 | SEQ ID NO: 2544 | |
| 52 | | | SEQ ID NO: 2542 | SEQ ID NO: 2543 | SEQ ID NO: 2544 | SEQ ID NO: 2545 |
| 53 | | | SEQ ID NO: 2542 | | SEQ ID NO: 2544 | |
| 54 | | | SEQ ID NO: 2542 | | SEQ ID NO: 2544 | SEQ ID NO: 2545 |
| 55 | | | SEQ ID NO: 2542 | | | SEQ ID NO: 2545 |
| 56 | | | SEQ ID NO: 2542 | SEQ ID NO: 2543 | | SEQ ID NO: 2545 |
| 57 | SEQ ID NO: 2541 | | SEQ ID NO: 2542 | SEQ ID NO: 2543 | | |
| 58 | SEQ ID NO: 2541 | | SEQ ID NO: 2542 | SEQ ID NO: 2543 | SEQ ID NO: 2544 | |
| 59 | SEQ ID NO: 2541 | | SEQ ID NO: 2542 | SEQ ID NO: 2543 | SEQ ID NO: 2544 | SEQ ID NO: 2545 |
| 60 | SEQ ID NO: 2541 | | SEQ ID NO: 2542 | | SEQ ID NO: 2544 | |
| 61 | SEQ ID NO: 2541 | | SEQ ID NO: 2542 | | SEQ ID NO: 2544 | SEQ ID NO: 2545 |
| 62 | SEQ ID NO: 2541 | | SEQ ID NO: 2542 | | | SEQ ID NO: 2545 |
| 63 | SEQ ID NO: 2541 | | SEQ ID NO: 2542 | SEQ ID NO: 2543 | | SEQ ID NO: 2545 |
| 64 | SEQ ID NO: 2548 | | | | | |
| 65 | SEQ ID NO: 2548 | KVS | | | | |
| 66 | SEQ ID NO: 2548 | KVS | SEQ ID NO: 2549 | | | |
| 67 | | KVS | | | | |
| 68 | | KVS | SEQ ID NO: 2549 | | | |
| 69 | | | SEQ ID NO: 2549 | | | |
| 70 | SEQ ID NO: 2548 | | SEQ ID NO: 2549 | | | |
| 71 | | | | SEQ ID NO: 2550 | | |
| 72 | | | | SEQ ID NO: 2550 | SEQ ID NO: 2551 | |
| 73 | | | | SEQ ID NO: 2550 | SEQ ID NO: 2551 | SEQ ID NO: 2552 |
| 74 | | | | | SEQ ID NO: 2551 | |
| 75 | | | | | SEQ ID NO: 2551 | SEQ ID NO: 2552 |
| 76 | | | | | | SEQ ID NO: 2552 |
| 77 | | | | SEQ ID NO: 2550 | | SEQ ID NO: 2552 |
| 78 | SEQ ID NO: 2548 | | | SEQ ID NO: 2550 | | |
| 79 | SEQ ID NO: 2548 | | | SEQ ID NO: 2550 | SEQ ID NO: 2551 | |
| 80 | SEQ ID NO: 2548 | | | SEQ ID NO: 2550 | SEQ ID NO: 2551 | SEQ ID NO: 2552 |
| 81 | SEQ ID NO: 2548 | | | | SEQ ID NO: 2551 | |
| 82 | SEQ ID NO: 2548 | | | | SEQ ID NO: 2551 | SEQ ID NO: 2552 |
| 83 | SEQ ID NO: 2548 | | | | | SEQ ID NO: 2552 |
| 84 | SEQ ID NO: 2548 | | | SEQ ID NO: 2550 | | SEQ ID NO: 2552 |
| 85 | SEQ ID NO: 2548 | KVS | | SEQ ID NO: 2550 | | |
| 86 | SEQ ID NO: 2548 | KVS | | SEQ ID NO: 2550 | SEQ ID NO: 2551 | |
| 87 | SEQ ID NO: 2548 | KVS | | SEQ ID NO: 2550 | SEQ ID NO: 2551 | SEQ ID NO: 2552 |
| 88 | SEQ ID NO: 2548 | KVS | | | SEQ ID NO: 2551 | |
| 89 | SEQ ID NO: 2548 | KVS | | | SEQ ID NO: 2551 | SEQ ID NO: 2552 |
| 90 | SEQ ID NO: 2548 | KVS | | | | SEQ ID NO: 2552 |
| 91 | SEQ ID NO: 2548 | KVS | | SEQ ID NO: 2550 | | SEQ ID NO: 2552 |
| 92 | SEQ ID NO: 2548 | KVS | SEQ ID NO: 2549 | SEQ ID NO: 2550 | | |
| 93 | SEQ ID NO: 2548 | KVS | SEQ ID NO: 2549 | SEQ ID NO: 2550 | SEQ ID NO: 2551 | |
| 94 | SEQ ID NO: 2548 | KVS | SEQ ID NO: 2549 | SEQ ID NO: 2550 | SEQ ID NO: 2551 | SEQ ID NO: 2552 |
| 95 | SEQ ID NO: 2548 | KVS | SEQ ID NO: 2549 | | SEQ ID NO: 2551 | |
| 96 | SEQ ID NO: 2548 | KVS | SEQ ID NO: 2549 | | SEQ ID NO: 2551 | SEQ ID NO: 2552 |
| 97 | SEQ ID NO: 2548 | KVS | SEQ ID NO: 2549 | | | SEQ ID NO: 2552 |
| 98 | SEQ ID NO: 2548 | KVS | SEQ ID NO: 2549 | SEQ ID NO: 2550 | | SEQ ID NO: 2552 |
| 99 | | KVS | | SEQ ID NO: 2550 | | |
| 100 | | KVS | | SEQ ID NO: 2550 | SEQ ID NO: 2551 | |
| 101 | | KVS | | SEQ ID NO: 2550 | SEQ ID NO: 2551 | SEQ ID NO: 2552 |
| 102 | | KVS | | | SEQ ID NO: 2551 | |
| 103 | | KVS | | | SEQ ID NO: 2551 | SEQ ID NO: 2552 |
| 104 | | KVS | | | | SEQ ID NO: 2552 |
| 105 | | KVS | | SEQ ID NO: 2550 | | SEQ ID NO: 2552 |
| 106 | | KVS | SEQ ID NO: 2549 | SEQ ID NO: 2550 | | |
| 107 | | KVS | SEQ ID NO: 2549 | SEQ ID NO: 2550 | SEQ ID NO: 2551 | |
| 108 | | KVS | SEQ ID NO: 2549 | SEQ ID NO: 2550 | SEQ ID NO: 2551 | SEQ ID NO: 2552 |
| 109 | | KVS | SEQ ID NO: 2549 | | SEQ ID NO: 2551 | |
| 110 | | KVS | SEQ ID NO: 2549 | | SEQ ID NO: 2551 | SEQ ID NO: 2552 |
| 111 | | KVS | SEQ ID NO: 2549 | | | SEQ ID NO: 2552 |
| 112 | | KVS | SEQ ID NO: 2549 | SEQ ID NO: 2550 | | SEQ ID NO: 2552 |
| 113 | | | SEQ ID NO: 2549 | SEQ ID NO: 2550 | | |
| 114 | | | SEQ ID NO: 2549 | SEQ ID NO: 2550 | SEQ ID NO: 2551 | |
| 115 | | | SEQ ID NO: 2549 | SEQ ID NO: 2550 | SEQ ID NO: 2551 | SEQ ID NO: 2552 |
| 116 | | | SEQ ID NO: 2549 | | SEQ ID NO: 2551 | |
| 117 | | | SEQ ID NO: 2549 | | SEQ ID NO: 2551 | SEQ ID NO: 2552 |
| 118 | | | SEQ ID NO: 2549 | | | SEQ ID NO: 2552 |
| 119 | | | SEQ ID NO: 2549 | SEQ ID NO: 2550 | | SEQ ID NO: 2552 |
| 120 | SEQ ID NO: 2548 | | SEQ ID NO: 2549 | SEQ ID NO: 2550 | | |
| 121 | SEQ ID NO: 2548 | | SEQ ID NO: 2549 | SEQ ID NO: 2550 | SEQ ID NO: 2551 | |
| 122 | SEQ ID NO: 2548 | | SEQ ID NO: 2549 | SEQ ID NO: 2550 | SEQ ID NO: 2551 | SEQ ID NO: 2552 |
| 123 | SEQ ID NO: 2548 | | SEQ ID NO: 2549 | | SEQ ID NO: 2551 | |
| 124 | SEQ ID NO: 2548 | | SEQ ID NO: 2549 | | SEQ ID NO: 2551 | SEQ ID NO: 2552 |
| 125 | SEQ ID NO: 2548 | | SEQ ID NO: 2549 | | | SEQ ID NO: 2552 |
| 126 | SEQ ID NO: 2548 | | SEQ ID NO: 2549 | SEQ ID NO: 2550 | | SEQ ID NO: 2552 |
| 127 | SEQ ID NO: 2555 | | | | | |
| 128 | SEQ ID NO: 2555 | KVS | | | | |
| 129 | SEQ ID NO: 2555 | KVS | SEQ ID NO: 2556 | | | |
| 130 | | KVS | | | | |
| 131 | | KVS | SEQ ID NO: 2556 | | | |
| 132 | | | SEQ ID NO: 2556 | | | |
| 133 | SEQ ID NO: 2555 | | SEQ ID NO: 2556 | | | |
| 134 | | | | SEQ ID NO: 2557 | | |
| 135 | | | | SEQ ID NO: 2557 | SEQ ID NO: 2558 | |
| 136 | | | | SEQ ID NO: 2557 | SEQ ID NO: 2558 | SEQ ID NO: 2559 |
| 137 | | | | | SEQ ID NO: 2558 | |
| 138 | | | | | SEQ ID NO: 2558 | SEQ ID NO: 2559 |
| 139 | | | | | | SEQ ID NO: 2559 |
| 140 | | | | SEQ ID NO: 2557 | | SEQ ID NO: 2559 |
| 141 | SEQ ID NO: 2555 | | | SEQ ID NO: 2557 | | |
| 142 | SEQ ID NO: 2555 | | | SEQ ID NO: 2557 | SEQ ID NO: 2558 | |
| 143 | SEQ ID NO: 2555 | | | SEQ ID NO: 2557 | SEQ ID NO: 2558 | SEQ ID NO: 2559 |
| 144 | SEQ ID NO: 2555 | | | | SEQ ID NO: 2558 | |
| 145 | SEQ ID NO: 2555 | | | | SEQ ID NO: 2558 | SEQ ID NO: 2559 |
| 146 | SEQ ID NO: 2555 | | | | | SEQ ID NO: 2559 |
| 147 | SEQ ID NO: 2555 | | | SEQ ID NO: 2557 | | SEQ ID NO: 2559 |
| 148 | SEQ ID NO: 2555 | KVS | | SEQ ID NO: 2557 | | |
| 149 | SEQ ID NO: 2555 | KVS | | SEQ ID NO: 2557 | SEQ ID NO: 2558 | |
| 150 | SEQ ID NO: 2555 | KVS | | SEQ ID NO: 2557 | SEQ ID NO: 2558 | SEQ ID NO: 2559 |
| 151 | SEQ ID NO: 2555 | KVS | | | SEQ ID NO: 2558 | |
| 152 | SEQ ID NO: 2555 | KVS | | | SEQ ID NO: 2558 | SEQ ID NO: 2559 |
| 153 | SEQ ID NO: 2555 | KVS | | | | SEQ ID NO: 2559 |
| 154 | SEQ ID NO: 2555 | KVS | | SEQ ID NO: 2557 | | SEQ ID NO: 2559 |
| 155 | SEQ ID NO: 2555 | KVS | SEQ ID NO: 2556 | SEQ ID NO: 2557 | | |
| 156 | SEQ ID NO: 2555 | KVS | SEQ ID NO: 2556 | SEQ ID NO: 2557 | SEQ ID NO: 2558 | |
| 157 | SEQ ID NO: 2555 | KVS | SEQ ID NO: 2556 | SEQ ID NO: 2557 | SEQ ID NO: 2558 | SEQ ID NO: 2559 |
| 158 | SEQ ID NO: 2555 | KVS | SEQ ID NO: 2556 | | SEQ ID NO: 2558 | |
| 159 | SEQ ID NO: 2555 | KVS | SEQ ID NO: 2556 | | SEQ ID NO: 2558 | SEQ ID NO: 2559 |
| 160 | SEQ ID NO: 2555 | KVS | SEQ ID NO: 2556 | SEQ ID NO: 2557 | | SEQ ID NO: 2559 |
| 161 | SEQ ID NO: 2555 | KVS | SEQ ID NO: 2556 | | | SEQ ID NO: 2559 |
| 162 | | KVS | | SEQ ID NO: 2557 | | |
| 163 | | KVS | | SEQ ID NO: 2557 | SEQ ID NO: 2558 | |
| 164 | | KVS | | SEQ ID NO: 2557 | SEQ ID NO: 2558 | SEQ ID NO: 2559 |
| 165 | | KVS | | | SEQ ID NO: 2558 | |
| 166 | | KVS | | | SEQ ID NO: 2558 | SEQ ID NO: 2559 |
| 167 | | KVS | | | | SEQ ID NO: 2559 |
| 168 | | KVS | | SEQ ID NO: 2557 | | SEQ ID NO: 2559 |
| 169 | | KVS | SEQ ID NO: 2556 | SEQ ID NO: 2557 | | |
| 170 | | KVS | SEQ ID NO: 2556 | SEQ ID NO: 2557 | SEQ ID NO: 2558 | |
| 171 | | KVS | SEQ ID NO: 2556 | SEQ ID NO: 2557 | SEQ ID NO: 2558 | SEQ ID NO: 2559 |
| 172 | | KVS | SEQ ID NO: 2556 | | SEQ ID NO: 2558 | |
| 173 | | KVS | SEQ ID NO: 2556 | | SEQ ID NO: 2558 | SEQ ID NO: 2559 |
| 174 | | KVS | SEQ ID NO: 2556 | | | SEQ ID NO: 2559 |
| 175 | | KVS | SEQ ID NO: 2556 | SEQ ID NO: 2557 | | SEQ ID NO: 2559 |
| 176 | | | SEQ ID NO: 2556 | SEQ ID NO: 2557 | | |
| 177 | | | SEQ ID NO: 2556 | SEQ ID NO: 2557 | SEQ ID NO: 2558 | |
| 178 | | | SEQ ID NO: 2556 | SEQ ID NO: 2557 | SEQ ID NO: 2558 | SEQ ID NO: 2559 |
| 179 | | | SEQ ID NO: 2556 | | SEQ ID NO: 2558 | |
| 180 | | | SEQ ID NO: 2556 | | SEQ ID NO: 2558 | SEQ ID NO: 2559 |
| 181 | | | SEQ ID NO: 2556 | | | SEQ ID NO: 2559 |
| 182 | | | SEQ ID NO: 2556 | SEQ ID NO: 2557 | | SEQ ID NO: 2559 |
| 183 | SEQ ID NO: 2555 | | SEQ ID NO: 2556 | SEQ ID NO: 2557 | | |
| 184 | SEQ ID NO: 2555 | | SEQ ID NO: 2556 | SEQ ID NO: 2557 | SEQ ID NO: 2558 | |
| 185 | SEQ ID NO: 2555 | | SEQ ID NO: 2556 | SEQ ID NO: 2557 | SEQ ID NO: 2558 | SEQ ID NO: 2559 |
| 186 | SEQ ID NO: 2555 | | SEQ ID NO: 2556 | | SEQ ID NO: 2558 | |
| 187 | SEQ ID NO: 2555 | | SEQ ID NO: 2556 | | SEQ ID NO: 2558 | SEQ ID NO: 2559 |
| 188 | SEQ ID NO: 2555 | | SEQ ID NO: 2556 | | | SEQ ID NO: 2559 |
| 189 | SEQ ID NO: 2555 | | SEQ ID NO: 2556 | SEQ ID NO: 2557 | | SEQ ID NO: 2559 |
| 190 | SEQ ID NO: 2562 | | | | | |
| 191 | SEQ ID NO: 2562 | KVS | | | | |
| 192 | SEQ ID NO: 2562 | KVS | SEQ ID NO: 25 | | | |
| 193 | | KVS | | | | |
| 194 | | KVS | SEQ ID NO: 25 | | | |
| 195 | | | SEQ ID NO: 25 | | | |
| 196 | SEQ ID NO: 2562 | | SEQ ID NO: 25 | | | |
| 197 | | | | SEQ ID NO: 2564 | | |
| 198 | | | | SEQ ID NO: 2564 | SEQ ID NO: 2565 | |
| 199 | | | | SEQ ID NO: 2564 | SEQ ID NO: 2565 | SEQ ID NO: 2566 |
| 200 | | | | | SEQ ID NO: 2565 | |
| 201 | | | | | SEQ ID NO: 2565 | SEQ ID NO: 2566 |
| 202 | | | | | | SEQ ID NO: 2566 |
| 203 | | | | SEQ ID NO: 2564 | | SEQ ID NO: 2566 |
| 204 | SEQ ID NO: 2562 | | | SEQ ID NO: 2564 | | |
| 205 | SEQ ID NO: 2562 | | | SEQ ID NO: 2564 | SEQ ID NO: 2565 | |
| 206 | SEQ ID NO: 2562 | | | SEQ ID NO: 2564 | SEQ ID NO: 2565 | SEQ ID NO: 2566 |
| 207 | SEQ ID NO: 2562 | | | | SEQ ID NO: 2565 | |
| 208 | SEQ ID NO: 2562 | | | | SEQ ID NO: 2565 | SEQ ID NO: 2566 |
| 209 | SEQ ID NO: 2562 | | | | | SEQ ID NO: 2566 |
| 210 | SEQ ID NO: 2562 | | | SEQ ID NO: 2564 | | SEQ ID NO: 2566 |
| 211 | SEQ ID NO: 2562 | KVS | | SEQ ID NO: 2564 | | |
| 212 | SEQ ID NO: 2562 | KVS | | SEQ ID NO: 2564 | SEQ ID NO: 2565 | |
| 213 | SEQ ID NO: 2562 | KVS | | SEQ ID NO: 2564 | SEQ ID NO: 2565 | SEQ ID NO: 2566 |
| 214 | SEQ ID NO: 2562 | KVS | | | SEQ ID NO: 2565 | |
| 215 | SEQ ID NO: 2562 | KVS | | | SEQ ID NO: 2565 | SEQ ID NO: 2566 |
| 216 | SEQ ID NO: 2562 | KVS | | | | SEQ ID NO: 2566 |
| 217 | SEQ ID NO: 2562 | KVS | | SEQ ID NO: 2564 | | SEQ ID NO: 2566 |
| 218 | SEQ ID NO: 2562 | KVS | SEQ ID NO: 25 | SEQ ID NO: 2564 | | |
| 219 | SEQ ID NO: 2562 | KVS | SEQ ID NO: 25 | SEQ ID NO: 2564 | SEQ ID NO: 2565 | |
| 220 | SEQ ID NO: 2562 | KVS | SEQ ID NO: 25 | SEQ ID NO: 2564 | SEQ ID NO: 2565 | SEQ ID NO: 2566 |
| 221 | SEQ ID NO: 2562 | KVS | SEQ ID NO: 25 | | SEQ ID NO: 2565 | |
| 222 | SEQ ID NO: 2562 | KVS | SEQ ID NO: 25 | | SEQ ID NO: 2565 | SEQ ID NO: 2566 |
| 223 | SEQ ID NO: 2562 | KVS | SEQ ID NO: 25 | SEQ ID NO: 2564 | | SEQ ID NO: 2566 |
| 224 | SEQ ID NO: 2562 | KVS | SEQ ID NO: 25 | | | SEQ ID NO: 2566 |
| 225 | | KVS | | SEQ ID NO: 2564 | | |
| 226 | | KVS | | SEQ ID NO: 2564 | SEQ ID NO: 2565 | |
| 227 | | KVS | | SEQ ID NO: 2564 | SEQ ID NO: 2565 | SEQ ID NO: 2566 |
| 228 | | KVS | | | SEQ ID NO: 2565 | |
| 229 | | KVS | | | SEQ ID NO: 2565 | SEQ ID NO: 2566 |
| 230 | | KVS | | | | SEQ ID NO: 2566 |
| 231 | | KVS | | SEQ ID NO: 2564 | | SEQ ID NO: 2566 |
| 232 | | KVS | SEQ ID NO: 25 | SEQ ID NO: 2564 | | |
| 233 | | KVS | SEQ ID NO: 25 | SEQ ID NO: 2564 | SEQ ID NO: 2565 | |
| 234 | | KVS | SEQ ID NO: 25 | SEQ ID NO: 2564 | SEQ ID NO: 2565 | SEQ ID NO: 2566 |
| 235 | | KVS | SEQ ID NO: 25 | | SEQ ID NO: 2565 | |
| 236 | | KVS | SEQ ID NO: 25 | | SEQ ID NO: 2565 | SEQ ID NO: 2566 |
| 237 | | KVS | SEQ ID NO: 25 | | | SEQ ID NO: 2566 |
| 238 | | KVS | SEQ ID NO: 25 | SEQ ID NO: 2564 | | SEQ ID NO: 2566 |
| 239 | | | SEQ ID NO: 25 | SEQ ID NO: 2564 | | |
| 240 | | | SEQ ID NO: 25 | SEQ ID NO: 2564 | SEQ ID NO: 2565 | |
| 241 | | | SEQ ID NO: 25 | SEQ ID NO: 2564 | SEQ ID NO: 2565 | SEQ ID NO: 2566 |
| 242 | | | SEQ ID NO: 25 | | SEQ ID NO: 2565 | |
| 243 | | | SEQ ID NO: 25 | | SEQ ID NO: 2565 | SEQ ID NO: 2566 |
| 244 | | | SEQ ID NO: 25 | | | SEQ ID NO: 2566 |
| 245 | | | SEQ ID NO: 25 | SEQ ID NO: 2564 | | SEQ ID NO: 2566 |
| 246 | SEQ ID NO: 2562 | | SEQ ID NO: 25 | SEQ ID NO: 2564 | | |
| 247 | SEQ ID NO: 2562 | | SEQ ID NO: 25 | SEQ ID NO: 2564 | SEQ ID NO: 2565 | |
| 248 | SEQ ID NO: 2562 | | SEQ ID NO: 25 | SEQ ID NO: 2564 | SEQ ID NO: 2565 | SEQ ID NO: 2566 |
| 249 | SEQ ID NO: 2562 | | SEQ ID NO: 25 | | SEQ ID NO: 2565 | |
| 250 | SEQ ID NO: 2562 | | SEQ ID NO: 25 | | SEQ ID NO: 2565 | SEQ ID NO: 2566 |
| 251 | SEQ ID NO: 2562 | | SEQ ID NO: 25 | | | SEQ ID NO: 2566 |
| 252 | SEQ ID NO: 2562 | | SEQ ID NO: 25 | SEQ ID NO: 2564 | | SEQ ID NO: 2566 |
| 253 | SEQ ID NO: 2569 | | | | | |
| 254 | SEQ ID NO: 2569 | KVS | | | | |
| 255 | SEQ ID NO: 2569 | KVS | SEQ ID NO: 2570 | | | |
| 256 | | KVS | | | | |
| 257 | | KVS | SEQ ID NO: 2570 | | | |
| 258 | | | SEQ ID NO: 2570 | | | |
| 259 | SEQ ID NO: 2569 | | SEQ ID NO: 2570 | | | |
| 260 | | | | SEQ ID NO: 2571 | | |
| 261 | | | | SEQ ID NO: 2571 | SEQ ID NO: 2572 | |
| 262 | | | | SEQ ID NO: 2571 | SEQ ID NO: 2572 | SEQ ID NO: 2573 |
| 263 | | | | | SEQ ID NO: 2572 | |
| 264 | | | | | SEQ ID NO: 2572 | SEQ ID NO: 2573 |
| 265 | | | | | | SEQ ID NO: 2573 |
| 266 | | | | SEQ ID NO: 2571 | | SEQ ID NO: 2573 |
| 267 | SEQ ID NO: 2569 | | | SEQ ID NO: 2571 | | |
| 268 | SEQ ID NO: 2569 | | | SEQ ID NO: 2571 | SEQ ID NO: 2572 | |
| 269 | SEQ ID NO: 2569 | | | SEQ ID NO: 2571 | SEQ ID NO: 2572 | SEQ ID NO: 2573 |
| 270 | SEQ ID NO: 2569 | | | | SEQ ID NO: 2572 | |
| 271 | SEQ ID NO: 2569 | | | | SEQ ID NO: 2572 | SEQ ID NO: 2573 |
| 272 | SEQ ID NO: 2569 | | | | | SEQ ID NO: 2573 |
| 273 | SEQ ID NO: 2569 | | | SEQ ID NO: 2571 | | SEQ ID NO: 2573 |
| 274 | SEQ ID NO: 2569 | KVS | | SEQ ID NO: 2571 | | |
| 275 | SEQ ID NO: 2569 | KVS | | SEQ ID NO: 2571 | SEQ ID NO: 2572 | |
| 276 | SEQ ID NO: 2569 | KVS | | SEQ ID NO: 2571 | SEQ ID NO: 2572 | SEQ ID NO: 2573 |
| 277 | SEQ ID NO: 2569 | KVS | | | SEQ ID NO: 2572 | |
| 278 | SEQ ID NO: 2569 | KVS | | | SEQ ID NO: 2572 | SEQ ID NO: 2573 |
| 279 | SEQ ID NO: 2569 | KVS | | | | SEQ ID NO: 2573 |
| 280 | SEQ ID NO: 2569 | KVS | | SEQ ID NO: 2571 | | SEQ ID NO: 2573 |
| 281 | SEQ ID NO: 2569 | KVS | SEQ ID NO: 2570 | SEQ ID NO: 2571 | | |
| 282 | SEQ ID NO: 2569 | KVS | SEQ ID NO: 2570 | SEQ ID NO: 2571 | SEQ ID NO: 2572 | |
| 283 | SEQ ID NO: 2569 | KVS | SEQ ID NO: 2570 | SEQ ID NO: 2571 | SEQ ID NO: 2572 | SEQ ID NO: 2573 |
| 284 | SEQ ID NO: 2569 | KVS | SEQ ID NO: 2570 | | SEQ ID NO: 2572 | |
| 285 | SEQ ID NO: 2569 | KVS | SEQ ID NO: 2570 | | SEQ ID NO: 2572 | SEQ ID NO: 2573 |
| 286 | SEQ ID NO: 2569 | KVS | SEQ ID NO: 2570 | SEQ ID NO: 2571 | | SEQ ID NO: 2573 |
| 287 | SEQ ID NO: 2569 | KVS | SEQ ID NO: 2570 | | | SEQ ID NO: 2573 |
| 288 | | KVS | | SEQ ID NO: 2571 | | |
| 289 | | KVS | | SEQ ID NO: 2571 | SEQ ID NO: 2572 | |
| 290 | | KVS | | SEQ ID NO: 2571 | SEQ ID NO: 2572 | SEQ ID NO: 2573 |
| 291 | | KVS | | | SEQ ID NO: 2572 | |
| 292 | | KVS | | | SEQ ID NO: 2572 | SEQ ID NO: 2573 |
| 293 | | KVS | | | | SEQ ID NO: 2573 |
| 294 | | KVS | | SEQ ID NO: 2571 | | SEQ ID NO: 2573 |
| 295 | | KVS | SEQ ID NO: 2570 | SEQ ID NO: 2571 | | |
| 296 | | KVS | SEQ ID NO: 2570 | SEQ ID NO: 2571 | SEQ ID NO: 2572 | |
| 297 | | KVS | SEQ ID NO: 2570 | SEQ ID NO: 2571 | SEQ ID NO: 2572 | SEQ ID NO: 2573 |
| 298 | | KVS | SEQ ID NO: 2570 | | SEQ ID NO: 2572 | |
| 299 | | KVS | SEQ ID NO: 2570 | | SEQ ID NO: 2572 | SEQ ID NO: 2573 |
| 300 | | KVS | SEQ ID NO: 2570 | | | SEQ ID NO: 2573 |
| 301 | | KVS | SEQ ID NO: 2570 | SEQ ID NO: 2571 | | SEQ ID NO: 2573 |
| 302 | | | SEQ ID NO: 2570 | SEQ ID NO: 2571 | | |
| 303 | | | SEQ ID NO: 2570 | SEQ ID NO: 2571 | SEQ ID NO: 2572 | |
| 304 | | | SEQ ID NO: 2570 | SEQ ID NO: 2571 | SEQ ID NO: 2572 | SEQ ID NO: 2573 |
| 305 | | | SEQ ID NO: 2570 | | SEQ ID NO: 2572 | |
| 306 | | | SEQ ID NO: 2570 | | SEQ ID NO: 2572 | SEQ ID NO: 2573 |
| 307 | | | SEQ ID NO: 2570 | | | SEQ ID NO: 2573 |
| 308 | | | SEQ ID NO: 2570 | SEQ ID NO: 2571 | | SEQ ID NO: 2573 |
| 309 | SEQ ID NO: 2569 | | SEQ ID NO: 2570 | SEQ ID NO: 2571 | | |
| 310 | SEQ ID NO: 2569 | | SEQ ID NO: 2570 | SEQ ID NO: 2571 | SEQ ID NO: 2572 | |
| 311 | SEQ ID NO: 2569 | | SEQ ID NO: 2570 | SEQ ID NO: 2571 | SEQ ID NO: 2572 | SEQ ID NO: 2573 |
| 312 | SEQ ID NO: 2569 | | SEQ ID NO: 2570 | | SEQ ID NO: 2572 | |
| 313 | SEQ ID NO: 2569 | | SEQ ID NO: 2570 | | SEQ ID NO: 2572 | SEQ ID NO: 2573 |
| 314 | SEQ ID NO: 2569 | | SEQ ID NO: 2570 | | | SEQ ID NO: 2573 |
| 315 | SEQ ID NO: 2569 | | SEQ ID NO: 2570 | SEQ ID NO: 2571 | | SEQ ID NO: 2573 |
| 316 | SEQ ID NO: 2576 | | | | | |
| 317 | SEQ ID NO: 2576 | WAS | | | | |
| 318 | SEQ ID NO: 2576 | WAS | SEQ ID NO: 2577 | | | |
| 319 | | WAS | | | | |
| 320 | | WAS | SEQ ID NO: 2577 | | | |
| 321 | | | SEQ ID NO: 2577 | | | |
| 322 | SEQ ID NO: 2576 | | SEQ ID NO: 2577 | | | |
| 323 | | | | SEQ ID NO: 2578 | | |
| 324 | | | | SEQ ID NO: 2578 | SEQ ID NO: 2579 | |
| 325 | | | | SEQ ID NO: 2578 | SEQ ID NO: 2579 | SEQ ID NO: 2580 |
| 326 | | | | | SEQ ID NO: 2579 | |
| 327 | | | | | SEQ ID NO: 2579 | SEQ ID NO: 2580 |
| 328 | | | | | | SEQ ID NO: 2580 |
| 329 | | | | SEQ ID NO: 2578 | | SEQ ID NO: 2580 |
| 330 | SEQ ID NO: 2576 | | | SEQ ID NO: 2578 | | |
| 331 | SEQ ID NO: 2576 | | | SEQ ID NO: 2578 | SEQ ID NO: 2579 | |
| 332 | SEQ ID NO: 2576 | | | SEQ ID NO: 2578 | SEQ ID NO: 2579 | SEQ ID NO: 2580 |
| 333 | SEQ ID NO: 2576 | | | | SEQ ID NO: 2579 | |
| 334 | SEQ ID NO: 2576 | | | | SEQ ID NO: 2579 | SEQ ID NO: 2580 |
| 335 | SEQ ID NO: 2576 | | | | | SEQ ID NO: 2580 |
| 336 | SEQ ID NO: 2576 | | | SEQ ID NO: 2578 | | SEQ ID NO: 2580 |
| 337 | SEQ ID NO: 2576 | WAS | | SEQ ID NO: 2578 | | |
| 338 | SEQ ID NO: 2576 | WAS | | SEQ ID NO: 2578 | SEQ ID NO: 2579 | |
| 339 | SEQ ID NO: 2576 | WAS | | SEQ ID NO: 2578 | SEQ ID NO: 2579 | SEQ ID NO: 2580 |
| 340 | SEQ ID NO: 2576 | WAS | | | SEQ ID NO: 2579 | |
| 341 | SEQ ID NO: 2576 | WAS | | | SEQ ID NO: 2579 | SEQ ID NO: 2580 |
| 342 | SEQ ID NO: 2576 | WAS | | | | SEQ ID NO: 2580 |
| 343 | SEQ ID NO: 2576 | WAS | | SEQ ID NO: 2578 | | SEQ ID NO: 2580 |
| 344 | SEQ ID NO: 2576 | WAS | SEQ ID NO: 2577 | SEQ ID NO: 2578 | | |
| 345 | SEQ ID NO: 2576 | WAS | SEQ ID NO: 2577 | SEQ ID NO: 2578 | SEQ ID NO: 2579 | |
| 346 | SEQ ID NO: 2576 | WAS | SEQ ID NO: 2577 | SEQ ID NO: 2578 | SEQ ID NO: 2579 | SEQ ID NO: 2580 |
| 347 | SEQ ID NO: 2576 | WAS | SEQ ID NO: 2577 | | SEQ ID NO: 2579 | |
| 348 | SEQ ID NO: 2576 | WAS | SEQ ID NO: 2577 | | SEQ ID NO: 2579 | SEQ ID NO: 2580 |
| 349 | SEQ ID NO: 2576 | WAS | SEQ ID NO: 2577 | SEQ ID NO: 2578 | | SEQ ID NO: 2580 |
| 350 | SEQ ID NO: 2576 | WAS | SEQ ID NO: 2577 | | | SEQ ID NO: 2580 |
| 351 | | WAS | | SEQ ID NO: 2578 | | |
| 352 | | WAS | | SEQ ID NO: 2578 | SEQ ID NO: 2579 | |
| 353 | | WAS | | SEQ ID NO: 2578 | SEQ ID NO: 2579 | SEQ ID NO: 2580 |
| 354 | | WAS | | | SEQ ID NO: 2579 | |
| 355 | | WAS | | | SEQ ID NO: 2579 | SEQ ID NO: 2580 |
| 356 | | WAS | | | | SEQ ID NO: 2580 |
| 357 | | WAS | | SEQ ID NO: 2578 | | SEQ ID NO: 2580 |
| 358 | | WAS | SEQ ID NO: 2577 | SEQ ID NO: 2578 | | |
| 359 | | WAS | SEQ ID NO: 2577 | SEQ ID NO: 2578 | SEQ ID NO: 2579 | |
| 360 | | WAS | SEQ ID NO: 2577 | SEQ ID NO: 2578 | SEQ ID NO: 2579 | SEQ ID NO: 2580 |
| 361 | | WAS | SEQ ID NO: 2577 | | SEQ ID NO: 2579 | |
| 362 | | WAS | SEQ ID NO: 2577 | | SEQ ID NO: 2579 | SEQ ID NO: 2580 |
| 363 | | WAS | SEQ ID NO: 2577 | | | SEQ ID NO: 2580 |
| 364 | | WAS | SEQ ID NO: 2577 | SEQ ID NO: 2578 | | SEQ ID NO: 2580 |
| 365 | | | SEQ ID NO: 2577 | SEQ ID NO: 2578 | | |
| 366 | | | SEQ ID NO: 2577 | SEQ ID NO: 2578 | SEQ ID NO: 2579 | |
| 367 | | | SEQ ID NO: 2577 | SEQ ID NO: 2578 | SEQ ID NO: 2579 | SEQ ID NO: 2580 |
| 368 | | | SEQ ID NO: 2577 | | SEQ ID NO: 2579 | |
| 369 | | | SEQ ID NO: 2577 | | SEQ ID NO: 2579 | SEQ ID NO: 2580 |
| 370 | | | SEQ ID NO: 2577 | | | SEQ ID NO: 2580 |
| 371 | | | SEQ ID NO: 2577 | SEQ ID NO: 2578 | | SEQ ID NO: 2580 |
| 372 | SEQ ID NO: 2576 | | SEQ ID NO: 2577 | SEQ ID NO: 2578 | | |
| 373 | SEQ ID NO: 2576 | | SEQ ID NO: 2577 | SEQ ID NO: 2578 | SEQ ID NO: 2579 | |
| 374 | SEQ ID NO: 2576 | | SEQ ID NO: 2577 | SEQ ID NO: 2578 | SEQ ID NO: 2579 | SEQ ID NO: 2580 |
| 375 | SEQ ID NO: 2576 | | SEQ ID NO: 2577 | | SEQ ID NO: 2579 | |
| 376 | SEQ ID NO: 2576 | | SEQ ID NO: 2577 | | SEQ ID NO: 2579 | SEQ ID NO: 2580 |
| 377 | SEQ ID NO: 2576 | | SEQ ID NO: 2577 | | | SEQ ID NO: 2580 |
| 378 | SEQ ID NO: 2576 | | SEQ ID NO: 2577 | SEQ ID NO: 2578 | | SEQ ID NO: 2580 |

TABLE I3

| | Light Chain HVR | | | Heavy Chain HVR | | |
|---|---|---|---|---|---|---|
| Antibody | L1 | L2 | L3 | H1 | H2 | H3 |
| 1 | SEQ ID NO: 2582 | | | | | |
| 2 | SEQ ID NO: 2582 | (I/V)KS | | | | |
| 3 | SEQ ID NO: 2582 | (I/V)KS | SEQ ID NO: 2583 | | | |
| 4 | | (I/V)KS | | | | |
| 5 | | (I/V)KS | SEQ ID NO: 2583 | | | |
| 6 | | | SEQ ID NO: 2583 | | | |
| 7 | SEQ ID NO: 2582 | | SEQ ID NO: 2583 | | | |
| 8 | SEQ ID NO: 2582 | | | SEQ ID NO: 2543 | | |
| 9 | SEQ ID NO: 2582 | | | SEQ ID NO: 2543 | SEQ ID NO: 2544 | |
| 10 | SEQ ID NO: 2582 | | | SEQ ID NO: 2543 | SEQ ID NO: 2544 | SEQ ID NO: 2545 |
| 11 | SEQ ID NO: 2582 | | | | SEQ ID NO: 2544 | |
| 12 | SEQ ID NO: 2582 | | | | SEQ ID NO: 2544 | SEQ ID NO: 2545 |
| 13 | SEQ ID NO: 2582 | | | | | SEQ ID NO: 2545 |
| 14 | SEQ ID NO: 2582 | | | SEQ ID NO: 2543 | | SEQ ID NO: 2545 |
| 15 | SEQ ID NO: 2582 | (I/V)KS | | SEQ ID NO: 2543 | | |
| 16 | SEQ ID NO: 2582 | (I/V)KS | | SEQ ID NO: 2543 | SEQ ID NO: 2544 | |
| 17 | SEQ ID NO: 2582 | (I/V)KS | | SEQ ID NO: 2543 | SEQ ID NO: 2544 | SEQ ID NO: 2545 |
| 18 | SEQ ID NO: 2582 | (I/V)KS | | | SEQ ID NO: 2544 | |
| 19 | SEQ ID NO: 2582 | (I/V)KS | | | SEQ ID NO: 2544 | SEQ ID NO: 2545 |
| 20 | SEQ ID NO: 2582 | (I/V)KS | | | | SEQ ID NO: 2545 |
| 21 | SEQ ID NO: 2582 | (I/V)KS | | SEQ ID NO: 2543 | | SEQ ID NO: 2545 |
| 22 | SEQ ID NO: 2582 | (I/V)KS | SEQ ID NO: 2583 | SEQ ID NO: 2543 | | |
| 23 | SEQ ID NO: 2582 | (I/V)KS | SEQ ID NO: 2583 | SEQ ID NO: 2543 | SEQ ID NO: 2544 | |
| 24 | SEQ ID NO: 2582 | (I/V)KS | SEQ ID NO: 2583 | SEQ ID NO: 2543 | SEQ ID NO: 2544 | SEQ ID NO: 2545 |
| 25 | SEQ ID NO: 2582 | (I/V)KS | SEQ ID NO: 2583 | | SEQ ID NO: 2544 | |
| 26 | SEQ ID NO: 2582 | (I/V)KS | SEQ ID NO: 2583 | | SEQ ID NO: 2544 | SEQ ID NO: 2545 |
| 27 | SEQ ID NO: 2582 | (I/V)KS | SEQ ID NO: 2583 | SEQ ID NO: 2543 | | SEQ ID NO: 2545 |
| 28 | SEQ ID NO: 2582 | (I/V)KS | SEQ ID NO: 2583 | | | SEQ ID NO: 2545 |
| 29 | | (I/V)KS | | SEQ ID NO: 2543 | | |
| 30 | | (I/V)KS | | SEQ ID NO: 2543 | SEQ ID NO: 2544 | |
| 31 | | (I/V)KS | | SEQ ID NO: 2543 | SEQ ID NO: 2544 | SEQ ID NO: 2545 |
| 32 | | (I/V)KS | | | SEQ ID NO: 2544 | |
| 33 | | (I/V)KS | | | SEQ ID NO: 2544 | SEQ ID NO: 2545 |
| 34 | | (I/V)KS | | | | SEQ ID NO: 2545 |
| 35 | | (I/V)KS | | SEQ ID NO: 2543 | | SEQ ID NO: 2545 |
| 36 | | (I/V)KS | SEQ ID NO: 2583 | SEQ ID NO: 2543 | | |
| 37 | | (I/V)KS | SEQ ID NO: 2583 | SEQ ID NO: 2543 | SEQ ID NO: 2544 | |
| 38 | | (I/V)KS | SEQ ID NO: 2583 | SEQ ID NO: 2543 | SEQ ID NO: 2544 | SEQ ID NO: 2545 |
| 39 | | (I/V)KS | SEQ ID NO: 2583 | | SEQ ID NO: 2544 | |
| 40 | | (I/V)KS | SEQ ID NO: 2583 | | SEQ ID NO: 2544 | SEQ ID NO: 2545 |
| 41 | | (I/V)KS | SEQ ID NO: 2583 | | | SEQ ID NO: 2545 |
| 42 | | (I/V)KS | SEQ ID NO: 2583 | SEQ ID NO: 2543 | | SEQ ID NO: 2545 |
| 43 | | | SEQ ID NO: 2583 | SEQ ID NO: 2543 | | |
| 44 | | | SEQ ID NO: 2583 | SEQ ID NO: 2543 | SEQ ID NO: 2544 | |
| 45 | | | SEQ ID NO: 2583 | SEQ ID NO: 2543 | SEQ ID NO: 2544 | SEQ ID NO: 2545 |
| 46 | | | SEQ ID NO: 2583 | | SEQ ID NO: 2544 | |
| 47 | | | SEQ ID NO: 2583 | | SEQ ID NO: 2544 | SEQ ID NO: 2545 |
| 48 | | | SEQ ID NO: 2583 | | | SEQ ID NO: 2545 |
| 49 | | | SEQ ID NO: 2583 | SEQ ID NO: 2543 | | SEQ ID NO: 2545 |
| 50 | SEQ ID NO: 2582 | | SEQ ID NO: 2583 | SEQ ID NO: 2543 | | |
| 51 | SEQ ID NO: 2582 | | SEQ ID NO: 2583 | SEQ ID NO: 2543 | SEQ ID NO: 2544 | |
| 52 | SEQ ID NO: 2582 | | SEQ ID NO: 2583 | SEQ ID NO: 2543 | SEQ ID NO: 2544 | SEQ ID NO: 2545 |
| 53 | SEQ ID NO: 2582 | | SEQ ID NO: 2583 | | SEQ ID NO: 2544 | |
| 54 | SEQ ID NO: 2582 | | SEQ ID NO: 2583 | | SEQ ID NO: 2544 | SEQ ID NO: 2545 |
| 55 | SEQ ID NO: 2582 | | SEQ ID NO: 2583 | | | SEQ ID NO: 2545 |
| 56 | SEQ ID NO: 2582 | | SEQ ID NO: 2583 | SEQ ID NO: 2543 | | SEQ ID NO: 2545 |
| 57 | SEQ ID NO: 2582 | | | SEQ ID NO: 2550 | | |
| 58 | SEQ ID NO: 2582 | | | SEQ ID NO: 2550 | SEQ ID NO: 2551 | |
| 59 | SEQ ID NO: 2582 | | | SEQ ID NO: 2550 | SEQ ID NO: 2551 | SEQ ID NO: 2552 |
| 60 | SEQ ID NO: 2582 | | | | SEQ ID NO: 2551 | |
| 61 | SEQ ID NO: 2582 | | | | SEQ ID NO: 2551 | SEQ ID NO: 2552 |
| 62 | SEQ ID NO: 2582 | | | | | SEQ ID NO: 2552 |
| 63 | SEQ ID NO: 2582 | | | SEQ ID NO: 2550 | | SEQ ID NO: 2552 |
| 64 | SEQ ID NO: 2582 | (I/V)KS | | SEQ ID NO: 2550 | | |
| 65 | SEQ ID NO: 2582 | (I/V)KS | | SEQ ID NO: 2550 | SEQ ID NO: 2551 | |
| 66 | SEQ ID NO: 2582 | (I/V)KS | | SEQ ID NO: 2550 | SEQ ID NO: 2551 | SEQ ID NO: 2552 |
| 67 | SEQ ID NO: 2582 | (I/V)KS | | | SEQ ID NO: 2551 | |
| 68 | SEQ ID NO: 2582 | (I/V)KS | | | SEQ ID NO: 2551 | SEQ ID NO: 2552 |
| 69 | SEQ ID NO: 2582 | (I/V)KS | | | | SEQ ID NO: 2552 |
| 70 | SEQ ID NO: 2582 | (I/V)KS | | SEQ ID NO: 2550 | | SEQ ID NO: 2552 |
| 71 | SEQ ID NO: 2582 | (I/V)KS | SEQ ID NO: 2583 | SEQ ID NO: 2550 | | |
| 72 | SEQ ID NO: 2582 | (I/V)KS | SEQ ID NO: 2583 | SEQ ID NO: 2550 | SEQ ID NO: 2551 | |
| 73 | SEQ ID NO: 2582 | (I/V)KS | SEQ ID NO: 2583 | SEQ ID NO: 2550 | SEQ ID NO: 2551 | SEQ ID NO: 2552 |
| 74 | SEQ ID NO: 2582 | (I/V)KS | SEQ ID NO: 2583 | | SEQ ID NO: 2551 | |
| 75 | SEQ ID NO: 2582 | (I/V)KS | SEQ ID NO: 2583 | | SEQ ID NO: 2551 | SEQ ID NO: 2552 |
| 76 | SEQ ID NO: 2582 | (I/V)KS | SEQ ID NO: 2583 | | | SEQ ID NO: 2552 |
| 77 | SEQ ID NO: 2582 | (I/V)KS | SEQ ID NO: 2583 | SEQ ID NO: 2550 | | SEQ ID NO: 2552 |
| 78 | | (I/V)KS | | SEQ ID NO: 2550 | | |
| 79 | | (I/V)KS | | SEQ ID NO: 2550 | SEQ ID NO: 2551 | |
| 80 | | (I/V)KS | | SEQ ID NO: 2550 | SEQ ID NO: 2551 | SEQ ID NO: 2552 |
| 81 | | (I/V)KS | | | SEQ ID NO: 2551 | |
| 82 | | (I/V)KS | | | SEQ ID NO: 2551 | SEQ ID NO: 2552 |
| 83 | | (I/V)KS | | | | SEQ ID NO: 2552 |
| 84 | | (I/V)KS | | SEQ ID NO: 2550 | | SEQ ID NO: 2552 |
| 85 | | (I/V)KS | SEQ ID NO: 2583 | SEQ ID NO: 2550 | | |
| 86 | | (I/V)KS | SEQ ID NO: 2583 | SEQ ID NO: 2550 | SEQ ID NO: 2551 | |
| 87 | | (I/V)KS | SEQ ID NO: 2583 | SEQ ID NO: 2550 | SEQ ID NO: 2551 | SEQ ID NO: 2552 |
| 88 | | (I/V)KS | SEQ ID NO: 2583 | | SEQ ID NO: 2551 | |
| 89 | | (I/V)KS | SEQ ID NO: 2583 | | SEQ ID NO: 2551 | SEQ ID NO: 2552 |
| 90 | | (I/V)KS | SEQ ID NO: 2583 | | | SEQ ID NO: 2552 |
| 91 | | (I/V)KS | SEQ ID NO: 2583 | SEQ ID NO: 2550 | | SEQ ID NO: 2552 |
| 92 | | | SEQ ID NO: 2583 | SEQ ID NO: 2550 | | |
| 93 | | | SEQ ID NO: 2583 | SEQ ID NO: 2550 | SEQ ID NO: 2551 | |
| 94 | | | SEQ ID NO: 2583 | SEQ ID NO: 2550 | SEQ ID NO: 2551 | SEQ ID NO: 2552 |
| 95 | | | SEQ ID NO: 2583 | | SEQ ID NO: 2551 | |
| 96 | | | SEQ ID NO: 2583 | | SEQ ID NO: 2551 | SEQ ID NO: 2552 |
| 97 | | | SEQ ID NO: 2583 | | | SEQ ID NO: 2552 |
| 98 | | | SEQ ID NO: 2583 | SEQ ID NO: 2550 | | SEQ ID NO: 2552 |
| 99 | SEQ ID NO: 2582 | | SEQ ID NO: 2583 | SEQ ID NO: 2550 | | |
| 100 | SEQ ID NO: 2582 | | SEQ ID NO: 2583 | SEQ ID NO: 2550 | SEQ ID NO: 2551 | |
| 101 | SEQ ID NO: 2582 | | SEQ ID NO: 2583 | SEQ ID NO: 2550 | SEQ ID NO: 2551 | SEQ ID NO: 2552 |
| 102 | SEQ ID NO: 2582 | | SEQ ID NO: 2583 | | SEQ ID NO: 2551 | |
| 103 | SEQ ID NO: 2582 | | SEQ ID NO: 2583 | | SEQ ID NO: 2551 | SEQ ID NO: 2552 |
| 104 | SEQ ID NO: 2582 | | SEQ ID NO: 2583 | | | SEQ ID NO: 2552 |
| 105 | SEQ ID NO: 2582 | | SEQ ID NO: 2583 | SEQ ID NO: 2550 | | SEQ ID NO: 2552 |
| 106 | SEQ ID NO: 2582 | | | SEQ ID NO: 2557 | | |
| 107 | SEQ ID NO: 2582 | | | SEQ ID NO: 2557 | SEQ ID NO: 2558 | |
| 108 | SEQ ID NO: 2582 | | | SEQ ID NO: 2557 | SEQ ID NO: 2558 | SEQ ID NO: 2559 |
| 109 | SEQ ID NO: 2582 | | | | SEQ ID NO: 2558 | |
| 110 | SEQ ID NO: 2582 | | | | SEQ ID NO: 2558 | SEQ ID NO: 2559 |
| 111 | SEQ ID NO: 2582 | | | | | SEQ ID NO: 2559 |
| 112 | SEQ ID NO: 2582 | | | SEQ ID NO: 2557 | | SEQ ID NO: 2559 |
| 113 | SEQ ID NO: 2582 | (I/V)KS | | SEQ ID NO: 2557 | | |
| 114 | SEQ ID NO: 2582 | (I/V)KS | | SEQ ID NO: 2557 | SEQ ID NO: 2558 | |
| 115 | SEQ ID NO: 2582 | (I/V)KS | | SEQ ID NO: 2557 | SEQ ID NO: 2558 | SEQ ID NO: 2559 |
| 116 | SEQ ID NO: 2582 | (I/V)KS | | | SEQ ID NO: 2558 | |
| 117 | SEQ ID NO: 2582 | (I/V)KS | | | SEQ ID NO: 2558 | SEQ ID NO: 2559 |
| 118 | SEQ ID NO: 2582 | (I/V)KS | | | | SEQ ID NO: 2559 |
| 119 | SEQ ID NO: 2582 | (I/V)KS | | SEQ ID NO: 2557 | | SEQ ID NO: 2559 |
| 120 | SEQ ID NO: 2582 | (I/V)KS | SEQ ID NO: 2583 | SEQ ID NO: 2557 | | |
| 121 | SEQ ID NO: 2582 | (I/V)KS | SEQ ID NO: 2583 | SEQ ID NO: 2557 | SEQ ID NO: 2558 | |
| 122 | SEQ ID NO: 2582 | (I/V)KS | SEQ ID NO: 2583 | SEQ ID NO: 2557 | SEQ ID NO: 2558 | SEQ ID NO: 2559 |
| 123 | SEQ ID NO: 2582 | (I/V)KS | SEQ ID NO: 2583 | | SEQ ID NO: 2558 | |
| 124 | SEQ ID NO: 2582 | (I/V)KS | SEQ ID NO: 2583 | | SEQ ID NO: 2558 | SEQ ID NO: 2559 |
| 125 | SEQ ID NO: 2582 | (I/V)KS | SEQ ID NO: 2583 | SEQ ID NO: 2557 | | SEQ ID NO: 2559 |
| 126 | SEQ ID NO: 2582 | (I/V)KS | SEQ ID NO: 2583 | | | SEQ ID NO: 2559 |
| 127 | | (I/V)KS | | SEQ ID NO: 2557 | | |
| 128 | | (I/V)KS | | SEQ ID NO: 2557 | SEQ ID NO: 2558 | |
| 129 | | (I/V)KS | | SEQ ID NO: 2557 | SEQ ID NO: 2558 | SEQ ID NO: 2559 |
| 130 | | (I/V)KS | | | SEQ ID NO: 2558 | |
| 131 | | (I/V)KS | | | SEQ ID NO: 2558 | SEQ ID NO: 2559 |
| 132 | | (I/V)KS | | | | SEQ ID NO: 2559 |
| 133 | | (I/V)KS | | SEQ ID NO: 2557 | | SEQ ID NO: 2559 |
| 134 | | (I/V)KS | SEQ ID NO: 2583 | SEQ ID NO: 2557 | | |
| 135 | | (I/V)KS | SEQ ID NO: 2583 | SEQ ID NO: 2557 | SEQ ID NO: 2558 | |
| 136 | | (I/V)KS | SEQ ID NO: 2583 | SEQ ID NO: 2557 | SEQ ID NO: 2558 | SEQ ID NO: 2559 |
| 137 | | (I/V)KS | SEQ ID NO: 2583 | | SEQ ID NO: 2558 | |
| 138 | | (I/V)KS | SEQ ID NO: 2583 | | SEQ ID NO: 2558 | SEQ ID NO: 2559 |
| 139 | | (I/V)KS | SEQ ID NO: 2583 | | | SEQ ID NO: 2559 |
| 140 | | (I/V)KS | SEQ ID NO: 2583 | SEQ ID NO: 2557 | | SEQ ID NO: 2559 |
| 141 | | | SEQ ID NO: 2583 | SEQ ID NO: 2557 | | |
| 142 | | | SEQ ID NO: 2583 | SEQ ID NO: 2557 | SEQ ID NO: 2558 | |
| 143 | | | SEQ ID NO: 2583 | SEQ ID NO: 2557 | SEQ ID NO: 2558 | SEQ ID NO: 2559 |
| 144 | | | SEQ ID NO: 2583 | | SEQ ID NO: 2558 | |
| 145 | | | SEQ ID NO: 2583 | | SEQ ID NO: 2558 | SEQ ID NO: 2559 |
| 146 | | | SEQ ID NO: 2583 | | | SEQ ID NO: 2559 |
| 147 | | | SEQ ID NO: 2583 | SEQ ID NO: 2557 | | SEQ ID NO: 2559 |
| 148 | SEQ ID NO: 2582 | | SEQ ID NO: 2583 | SEQ ID NO: 2557 | | |
| 149 | SEQ ID NO: 2582 | | SEQ ID NO: 2583 | SEQ ID NO: 2557 | SEQ ID NO: 2558 | |
| 150 | SEQ ID NO: 2582 | | SEQ ID NO: 2583 | SEQ ID NO: 2557 | SEQ ID NO: 2558 | SEQ ID NO: 2559 |
| 151 | SEQ ID NO: 2582 | | SEQ ID NO: 2583 | | SEQ ID NO: 2558 | |
| 152 | SEQ ID NO: 2582 | | SEQ ID NO: 2583 | | SEQ ID NO: 2558 | SEQ ID NO: 2559 |
| 153 | SEQ ID NO: 2582 | | SEQ ID NO: 2583 | | | SEQ ID NO: 2559 |
| 154 | SEQ ID NO: 2582 | | SEQ ID NO: 2583 | SEQ ID NO: 2557 | | SEQ ID NO: 2559 |
| 155 | SEQ ID NO: 2582 | | | SEQ ID NO: 2564 | | |
| 156 | SEQ ID NO: 2582 | | | SEQ ID NO: 2564 | SEQ ID NO: 2565 | |
| 157 | SEQ ID NO: 2582 | | | SEQ ID NO: 2564 | SEQ ID NO: 2565 | SEQ ID NO: 2566 |
| 158 | SEQ ID NO: 2582 | | | | SEQ ID NO: 2565 | |
| 159 | SEQ ID NO: 2582 | | | | SEQ ID NO: 2565 | SEQ ID NO: 2566 |
| 160 | SEQ ID NO: 2582 | | | | | SEQ ID NO: 2566 |
| 161 | SEQ ID NO: 2582 | | | SEQ ID NO: 2564 | | SEQ ID NO: 2566 |
| 162 | SEQ ID NO: 2582 | (I/V)KS | | SEQ ID NO: 2564 | | |
| 163 | SEQ ID NO: 2582 | (I/V)KS | | SEQ ID NO: 2564 | SEQ ID NO: 2565 | |
| 164 | SEQ ID NO: 2582 | (I/V)KS | | SEQ ID NO: 2564 | SEQ ID NO: 2565 | SEQ ID NO: 2566 |
| 165 | SEQ ID NO: 2582 | (I/V)KS | | | SEQ ID NO: 2565 | |
| 166 | SEQ ID NO: 2582 | (I/V)KS | | | SEQ ID NO: 2565 | SEQ ID NO: 2566 |
| 167 | SEQ ID NO: 2582 | (I/V)KS | | | | SEQ ID NO: 2566 |
| 168 | SEQ ID NO: 2582 | (I/V)KS | | SEQ ID NO: 2564 | | SEQ ID NO: 2566 |
| 169 | SEQ ID NO: 2582 | (I/V)KS | SEQ ID NO: 2583 | SEQ ID NO: 2564 | | |
| 170 | SEQ ID NO: 2582 | (I/V)KS | SEQ ID NO: 2583 | SEQ ID NO: 2564 | SEQ ID NO: 2565 | |
| 171 | SEQ ID NO: 2582 | (I/V)KS | SEQ ID NO: 2583 | SEQ ID NO: 2564 | SEQ ID NO: 2565 | SEQ ID NO: 2566 |
| 172 | SEQ ID NO: 2582 | (I/V)KS | SEQ ID NO: 2583 | | SEQ ID NO: 2565 | |
| 173 | SEQ ID NO: 2582 | (I/V)KS | SEQ ID NO: 2583 | | SEQ ID NO: 2565 | SEQ ID NO: 2566 |
| 174 | SEQ ID NO: 2582 | (I/V)KS | SEQ ID NO: 2583 | SEQ ID NO: 2564 | | SEQ ID NO: 2566 |
| 175 | SEQ ID NO: 2582 | (I/V)KS | SEQ ID NO: 2583 | | | SEQ ID NO: 2566 |
| 176 | | (I/V)KS | | SEQ ID NO: 2564 | | |
| 177 | | (I/V)KS | | SEQ ID NO: 2564 | SEQ ID NO: 2565 | |
| 178 | | (I/V)KS | | SEQ ID NO: 2564 | SEQ ID NO: 2565 | SEQ ID NO: 2566 |
| 179 | | (I/V)KS | | | SEQ ID NO: 2565 | |
| 180 | | (I/V)KS | | | SEQ ID NO: 2565 | SEQ ID NO: 2566 |
| 181 | | (I/V)KS | | | | SEQ ID NO: 2566 |
| 182 | | (I/V)KS | | SEQ ID NO: 2564 | | SEQ ID NO: 2566 |
| 183 | | (I/V)KS | SEQ ID NO: 2583 | SEQ ID NO: 2564 | | |
| 184 | | (I/V)KS | SEQ ID NO: 2583 | SEQ ID NO: 2564 | SEQ ID NO: 2565 | |
| 185 | | (I/V)KS | SEQ ID NO: 2583 | SEQ ID NO: 2564 | SEQ ID NO: 2565 | SEQ ID NO: 2566 |
| 186 | | (I/V)KS | SEQ ID NO: 2583 | | SEQ ID NO: 2565 | |
| 187 | | (I/V)KS | SEQ ID NO: 2583 | | SEQ ID NO: 2565 | SEQ ID NO: 2566 |
| 188 | | (I/V)KS | SEQ ID NO: 2583 | | | SEQ ID NO: 2566 |
| 189 | | (I/V)KS | SEQ ID NO: 2583 | SEQ ID NO: 2564 | | SEQ ID NO: 2566 |
| 190 | | | SEQ ID NO: 2583 | SEQ ID NO: 2564 | | |
| 191 | | | SEQ ID NO: 2583 | SEQ ID NO: 2564 | SEQ ID NO: 2565 | |
| 192 | | | SEQ ID NO: 2583 | SEQ ID NO: 2564 | SEQ ID NO: 2565 | SEQ ID NO: 2566 |
| 193 | | | SEQ ID NO: 2583 | | SEQ ID NO: 2565 | |
| 194 | | | SEQ ID NO: 2583 | | SEQ ID NO: 2565 | SEQ ID NO: 2566 |
| 195 | | | SEQ ID NO: 2583 | | | SEQ ID NO: 2566 |
| 196 | | | SEQ ID NO: 2583 | SEQ ID NO: 2564 | | SEQ ID NO: 2566 |
| 197 | SEQ ID NO: 2582 | | SEQ ID NO: 2583 | SEQ ID NO: 2564 | | |
| 198 | SEQ ID NO: 2582 | | SEQ ID NO: 2583 | SEQ ID NO: 2564 | SEQ ID NO: 2565 | |
| 199 | SEQ ID NO: 2582 | | SEQ ID NO: 2583 | SEQ ID NO: 2564 | SEQ ID NO: 2565 | SEQ ID NO: 2566 |
| 200 | SEQ ID NO: 2582 | | SEQ ID NO: 2583 | | SEQ ID NO: 2565 | |
| 201 | SEQ ID NO: 2582 | | SEQ ID NO: 2583 | | SEQ ID NO: 2565 | SEQ ID NO: 2566 |
| 202 | SEQ ID NO: 2582 | | SEQ ID NO: 2583 | | | SEQ ID NO: 2566 |
| 203 | SEQ ID NO: 2582 | | SEQ ID NO: 2583 | SEQ ID NO: 2564 | | SEQ ID NO: 2566 |
| 204 | SEQ ID NO: 2582 | | | SEQ ID NO: 2571 | | |
| 205 | SEQ ID NO: 2582 | | | SEQ ID NO: 2571 | SEQ ID NO: 2572 | |
| 206 | SEQ ID NO: 2582 | | | SEQ ID NO: 2571 | SEQ ID NO: 2572 | SEQ ID NO: 2573 |
| 207 | SEQ ID NO: 2582 | | | | SEQ ID NO: 2572 | |
| 208 | SEQ ID NO: 2582 | | | | SEQ ID NO: 2572 | SEQ ID NO: 2573 |
| 209 | SEQ ID NO: 2582 | | | | | SEQ ID NO: 2573 |
| 210 | SEQ ID NO: 2582 | | | SEQ ID NO: 2571 | | SEQ ID NO: 2573 |
| 211 | SEQ ID NO: 2582 | (I/V)KS | | SEQ ID NO: 2571 | | |
| 212 | SEQ ID NO: 2582 | (I/V)KS | | SEQ ID NO: 2571 | SEQ ID NO: 2572 | |
| 213 | SEQ ID NO: 2582 | (I/V)KS | | SEQ ID NO: 2571 | SEQ ID NO: 2572 | SEQ ID NO: 2573 |
| 214 | SEQ ID NO: 2582 | (I/V)KS | | | SEQ ID NO: 2572 | |
| 215 | SEQ ID NO: 2582 | (I/V)KS | | | SEQ ID NO: 2572 | SEQ ID NO: 2573 |
| 216 | SEQ ID NO: 2582 | (I/V)KS | | | | SEQ ID NO: 2573 |
| 217 | SEQ ID NO: 2582 | (I/V)KS | | SEQ ID NO: 2571 | | SEQ ID NO: 2573 |
| 218 | SEQ ID NO: 2582 | (I/V)KS | SEQ ID NO: 2583 | SEQ ID NO: 2571 | | |
| 219 | SEQ ID NO: 2582 | (I/V)KS | SEQ ID NO: 2583 | SEQ ID NO: 2571 | SEQ ID NO: 2572 | |
| 220 | SEQ ID NO: 2582 | (I/V)KS | SEQ ID NO: 2583 | SEQ ID NO: 2571 | SEQ ID NO: 2572 | SEQ ID NO: 2573 |
| 221 | SEQ ID NO: 2582 | (I/V)KS | SEQ ID NO: 2583 | | SEQ ID NO: 2572 | |
| 222 | SEQ ID NO: 2582 | (I/V)KS | SEQ ID NO: 2583 | | SEQ ID NO: 2572 | SEQ ID NO: 2573 |
| 223 | SEQ ID NO: 2582 | (I/V)KS | SEQ ID NO: 2583 | SEQ ID NO: 2571 | | SEQ ID NO: 2573 |
| 224 | SEQ ID NO: 2582 | (I/V)KS | SEQ ID NO: 2583 | | | SEQ ID NO: 2573 |
| 225 | | (I/V)KS | | SEQ ID NO: 2571 | | |
| 226 | | (I/V)KS | | SEQ ID NO: 2571 | SEQ ID NO: 2572 | |
| 227 | | (I/V)KS | | SEQ ID NO: 2571 | SEQ ID NO: 2572 | SEQ ID NO: 2573 |
| 228 | | (I/V)KS | | | SEQ ID NO: 2572 | |
| 229 | | (I/V)KS | | | SEQ ID NO: 2572 | SEQ ID NO: 2573 |
| 230 | | (I/V)KS | | | | SEQ ID NO: 2573 |
| 231 | | (I/V)KS | | SEQ ID NO: 2571 | | SEQ ID NO: 2573 |
| 232 | | (I/V)KS | SEQ ID NO: 2583 | SEQ ID NO: 2571 | | |
| 233 | | (I/V)KS | SEQ ID NO: 2583 | SEQ ID NO: 2571 | SEQ ID NO: 2572 | |
| 234 | | (I/V)KS | SEQ ID NO: 2583 | SEQ ID NO: 2571 | SEQ ID NO: 2572 | SEQ ID NO: 2573 |
| 235 | | (I/V)KS | SEQ ID NO: 2583 | | SEQ ID NO: 2572 | |
| 236 | | (I/V)KS | SEQ ID NO: 2583 | | SEQ ID NO: 2572 | SEQ ID NO: 2573 |
| 237 | | (I/V)KS | SEQ ID NO: 2583 | | | SEQ ID NO: 2573 |
| 238 | | (I/V)KS | SEQ ID NO: 2583 | SEQ ID NO: 2571 | | SEQ ID NO: 2573 |
| 239 | | | SEQ ID NO: 2583 | SEQ ID NO: 2571 | | |
| 240 | | | SEQ ID NO: 2583 | SEQ ID NO: 2571 | SEQ ID NO: 2572 | |
| 241 | | | SEQ ID NO: 2583 | SEQ ID NO: 2571 | SEQ ID NO: 2572 | SEQ ID NO: 2573 |
| 242 | | | SEQ ID NO: 2583 | | SEQ ID NO: 2572 | |
| 243 | | | SEQ ID NO: 2583 | | SEQ ID NO: 2572 | SEQ ID NO: 2573 |
| 244 | | | SEQ ID NO: 2583 | | | SEQ ID NO: 2573 |
| 245 | | | SEQ ID NO: 2583 | SEQ ID NO: 2571 | | SEQ ID NO: 2573 |
| 246 | SEQ ID NO: 2582 | | SEQ ID NO: 2583 | SEQ ID NO: 2571 | | |
| 247 | SEQ ID NO: 2582 | | SEQ ID NO: 2583 | SEQ ID NO: 2571 | SEQ ID NO: 2572 | |
| 248 | SEQ ID NO: 2582 | | SEQ ID NO: 2583 | SEQ ID NO: 2571 | SEQ ID NO: 2572 | SEQ ID NO: 2573 |
| 249 | SEQ ID NO: 2582 | | SEQ ID NO: 2583 | | SEQ ID NO: 2572 | |
| 250 | SEQ ID NO: 2582 | | SEQ ID NO: 2583 | | SEQ ID NO: 2572 | SEQ ID NO: 2573 |
| 251 | SEQ ID NO: 2582 | | SEQ ID NO: 2583 | | | SEQ ID NO: 2573 |
| 252 | SEQ ID NO: 2582 | | SEQ ID NO: 2583 | SEQ ID NO: 2571 | | SEQ ID NO: 2573 |

TABLE I4

| Comments | Sequence |
|---|---|
| HJ23.4 light chain variable | DVVMTQTPLSLPVSLGDQAFISCRSSQNLVHSNGNTYLHWYLQK |
| region | PGQSPKLLIYIVSNRFSGVPDRFSGSGSGTDFTLEISRVEAEDLGV |
| | YFCSQSTHVPLTFGAGTKLELK (SEQ ID NO: 2539) |
| HJ23.4 heavy chain variable | EVQLQQSGPDLVKPGASVKMSCKASGYTFTDYNIHWVKQSHGK |
| region | TLEWIGYINPNTGGTYYNQKFKGKATMTVNKSSSTAYMELRSLT |
| | SEDSAVYYCVATRWDGVNWAQGTLVTVSA (SEQ ID NO: 2540) |
| HJ23.4 L1 | QNLVHSNGNTY (SEQ ID NO: 2541) |
| HJ23.4 L2 | IVS |
| HJ23.4 L3 | SQSTHVPLT (SEQ ID NO: 2542) |
| HJ23.4 H1 | GYTFTDYN (SEQ ID NO: 2543) |
| HJ23.4 H2 | INPNTGGT (SEQ ID NO: 2544) |
| HJ23.4 H3 | VATRWDGVN (SEQ ID NO: 2545) |
| HJ23.7 light chain variable | DVVMTQTPLSLPVSLGDQASISCRSSQSLVHSNGNTYLHWYLQK |
| region | PGQSPKWYKVSNRFSGVPDRFSGSGSGTDFTLKISRVEAEDLGV |
| | YFCSQSTHVPLTFGAGTKLELK (SEQ ID NO: 2546) |
| HJ23.7 heavy chain variable | EVQLQQSGAELVKPGASVKLSCTSSGFNIKGYYIHWVKQRTEQG |
| region | LEWIGRIDPEDGETKNAPKFQGKATFGTDTFSNTAYLRLSSLTSE |
| | DTGVYYCVRTETRGAYWGPGTLVTVSA (SEQ ID NO: 2547) |
| HJ23.7 L1 | QSLVHSNGNTY (SEQ ID NO: 2548) |
| HJ23.7 L2 | KVS |
| HJ23.7 L3 | SQSTHVPLT (SEQ ID NO: 2549) |
| HJ23.7 H1 | GFNIKGYY (SEQ ID NO: 2550) |
| HJ23.7 H2 | IDPEDGET (SEQ ID NO: 2551) |
| HJ23.7 H3 | VRTETRGAY (SEQ ID NO: 2552) |
| HJ23.8 light chain variable | DVVMTQTPLSLPVSLGDQASISCRSSQSLVHSNGDTYLHWYLQK |
| region | RGQSPKWYKVSNRFSGVPDRFSGSGSGTDFTLKISRVEAEDLGV |
| | YFCSQTTHVPLTFGAGTKLELK (SEQ ID NO: 2553) |
| HJ23.8 heavy chain variable | QVPLQQPGAEFVKPGASVKLSCKASAYTFTRYWMHWVKQRPGR |
| region | GLEWIGRIDPNSGGTNYNEKFKSKATFTVDKPSSTSYMQLSSLTS |
| | EDSAVYFCVFTGTLFDYWGQGTTLTVSS (SEQ ID NO: 2554) |
| HJ23.8 L1 | QSLVHSNGDTY (SEQ ID NO: 2555) |
| HJ23.8 L2 | KVS |
| HJ23.8 L3 | SQTTHVPLT (SEQ ID NO: 2556) |
| HJ23.8 H1 | AYTFTRYW (SEQ ID NO: 2557) |
| HJ23.8 H2 | IDPNSGGT (SEQ ID NO: 2558) |
| HJ23.8 H3 | VFTGTLFDY (SEQ ID NO: 2559) |
| HJ23.9 light chain variable | DVVMTQTPLSLPVSLGDQASISCKSSQSLVHSNGNTYLHWYLQK |
| region | PGQSPKWYKVSNRFSGVPDRFSGSGSGTDFTLKISRVEAEDLGV |
| | YFCSQSTHVPPTFGGGTKLEIK (SEQ ID NO: 2560) |
| HJ23.9 heavy chain variable | EVQLQHSGPVLVKPGASVKMSCKSSGYTFTDYYLNWVKQSHGK |
| region | SPEWIGVINPNTGSTSYNQKFKGKATLTVDKSSSTAYMDLNSLTS |
| | EDSAVYYCATHYYGSIYKQAWFAYWGQGTLVT (SEQ ID NO: 2561) |
| HJ23.9 L1 | QSLVHSNGNTY (SEQ ID NO: 2562) |
| HJ23.9 L2 | KVS |
| HJ23.9 L3 | SQSTHVPPT (SEQ ID NO: 2563) |
| HJ23.9 H1 | GYTFTDYY (SEQ ID NO: 2564) |
| HJ23.9 H2 | INPNTGST (SEQ ID NO: 2565) |
| HJ23.9 H3 | ATHYYGSIYKQAWFAY (SEQ ID NO: 2566) |
| HJ23.10 light chain variable | DVVMTQTPLSLPVSLGDQASISCKSSQSLVHSNGNTYLHWYLQK |
| region | PGQSPKWYKVSNRFSGVPDRFSGSGSGTDFTLKISRVEAEDLGI |
| | YFCSQSTHVPPTFGGGTKLEIK (SEQ ID NO: 2567) |
| HJ23.10 heavy chain | EVQLQHSGPVLVKPGASVKMSCKASGYTFTDYYMNWVKQSHG |
| variable region | KSPEWIGVINPNTGSTSYNQKFKGKATLTVDKSSSTAYMDLNSLT |
| | SEDSAVYYCATHYYGSIYKQAWFAYWGQGTLVTV (SEQ ID NO: 2568) |
| HJ23.10 L1 | QSLVHSNGNTY (SEQ ID NO: 2569) |
| HJ23.10 L2 | KVS |
| HJ23.10 L3 | SQSTHVPPT (SEQ ID NO: 2570) |
| HJ23.10 H1 | GYTFTDYY (SEQ ID NO: 2571) |
| HJ23.10 H2 | INPNTGST (SEQ ID NO: 2572) |
| HJ23.10 H3 | ATHYYGSIYKQAWFAY (SEQ ID NO: 2573) |
| HJ23.13 light chain variable | DIVMSQSPSSLAVSVGEKVTMSCKSSQSLLYSSNLKNYLAWFQQ |
| region | KPGQSPKLLIYWASIRESGVPDRFTGSGSGTDFTLTINSVKAEDLA |
| | VYYCQQYYTFPLTFGAGTKLELK(SEQ ID NO: 2574) |
| HJ23.13 heavy chain | EVQLVETGGGLVQPKGSLKLSCAASGFSFNINAMHWVRQAPGT |
| variable region | GLKWVARIRSGSNDFATYYADSVKDRFTISRDDSHSMLYLQMN |
| | NLKTEDTAIYFCVREYVNYFVHWGQGTLVTVSA (SEQ ID NO: 2575) |
| HJ23.13 L1 | QSLLYSSNLKNY (SEQ ID NO: 2576) |
| HJ23.13 L2 | WAS |
| HJ23.13 L3 | QQYYTFPLT (SEQ ID NO: 2577) |
| HJ23.13 H1 | GFSFNINA (SEQ ID NO: 2578) |
| HJ23.13 H2 | IRSGSNDFAT (SEQ ID NO: 2579) |
| HJ23.13 H3 | VREYVNYFVH (SEQ ID NO: 2580) |
| | DHRDAGDLWFPGES (SEQ ID NO: 2581) |
| Consensus L1 | QX1LVHSNGX2TY, where X1 is S, T, N, or Q and X2 is D or N |
| | (SEQ ID NO: 2582) |
| Consensus L2 | X1VS, where X1 is I or K |
| Consensus L3 | SQX1THVPX2T, where X1 is S, T, N, or Q and X2 is P or L |
| | (SEQ ID NO: 2583) |

[0477] In some embodiments, each of the light chain variable regions and each of the heavy chain variable regions disclosed above, including those in Table 17B (e.g., antibody 1-378) and Table 17C (antibody 1-252) may be attached to the light chain constant regions (TABLE EN1) and heavy chain constant regions (TABLE EN2) to form complete antibody light and heavy chains, respectively, as further discussed below. Further, each of the generated heavy and light chain sequences may be combined to form a complete antibody structure. It should be understood that the heavy chain and light chain variable regions provided herein can also be attached to other constant domains having different sequences than the exemplary sequences listed herein.

J. PCT Patent Application Publication No. WO2020/079580A1

[0478] In some embodiments, the TREM2 agonist is an antibody, or an antigen-binding fragment thereof, as described in PCT Patent Application Publication No. WO2020/079580A1 (“the '580 application”), which is incorporated by reference herein, in its entirety.

[0479] In some embodiments, the TREM2 binding agent comprises an antibody that comprises a light chain variable domain comprising a CDRL1, CDRL2, and CDRL3, and a heavy chain variable domain comprising a CDRH1, CDRH2, and CDRH3 disclosed in the '580 application specification. In some embodiments, the TREM2 binding agent comprises an antibody that comprises a light chain variable domain and a heavy chain variable domain disclosed in the '580 application specification.

[0480] In some embodiments, the antibody or antigen-binding fragment thereof comprises:
[0481] a) a heavy chain variable region CDR1 comprising SEQ ID NO:2623 or SEQ ID NO:2626 or SEQ ID NO:2627 or SEQ ID NO:2629; a heavy chain variable region CDR2 comprising SEQ ID NO:2624 or SEQ ID NO:2628, or SEQ ID NO:2630; a heavy chain variable region CDR3 comprising SEQ ID NO:2625 or SEQ ID NO:2631; a light chain variable region CDR1 comprising SEQ ID NO:2636 or SEQ ID NO:2639 or SEQ ID NO:2642; a light chain variable region CDR2 comprising SEQ ID NO:2637 or SEQ ID NO:2640; and a light chain variable region CDR3 comprising SEQ ID NO:2638 or SEQ ID NO:2641;
[0482] b) a heavy chain variable region CDR1 comprising SEQ ID NO:2586 or SEQ ID NO:2589 or SEQ ID NO:2590 or SEQ ID NO:2592; a heavy chain variable region CDR2 comprising SEQ ID NO:2587 or SEQ ID NO:2591 or SEQ ID NO:2593; a heavy chain variable region CDR3 comprising SEQ ID NO:2588 or SEQ ID NO:2594; a light chain variable region CDR1 comprising SEQ ID NO:2599 or SEQ ID NO:2602 or SEQ ID NO:2605; a light chain variable region CDR2 comprising SEQ ID NO:2600 or SEQ ID NO:2603; and a light chain variable region CDR3 comprising SEQ ID NO:2601 or SEQ ID NO:2604;
[0483] c) a heavy chain variable region CDR1 comprising SEQ ID NO:2586 or SEQ ID NO:2589 or SEQ ID NO:2590 or SEQ ID NO:2592; a heavy chain variable region CDR2 comprising SEQ ID NO:2587 or SEQ ID NO:2591 or SEQ ID NO:2593; a heavy chain variable region CDR3 comprising SEQ ID NO:2588 or SEQ ID NO:2594; a light chain variable region CDR1 comprising SEQ ID NO:2599 or SEQ ID NO:2602 or SEQ ID NO:2605; a light chain variable region CDR2 comprising SEQ ID NO:2600 or SEQ ID NO:2603; and a light chain variable region CDR3 comprising SEQ ID NO:2660 or SEQ ID NO:2661; or
[0484] d) a heavy chain variable region CDR1 comprising SEQ ID NO:2666 or SEQ ID NO:2669 or SEQ ID NO:2670 or SEQ ID NO:2672; a heavy chain variable region CDR2 comprising SEQ ID NO:2667 or SEQ ID NO:2671 or SEQ ID NO:2673; a heavy chain variable region CDR3 comprising SEQ ID NO:2668 or SEQ ID NO:2674; a light chain variable region CDR1 comprising SEQ ID NO:2679 or SEQ ID NO:2682 or SEQ ID NO:2685; a light chain variable region CDR2 comprising SEQ ID NO:2680 or SEQ ID NO:2683; and a light chain variable region CDR3 comprising SEQ ID NO:2681 or SEQ ID NO:2684.

[0485] In some embodiments, the antibody or antigen-binding fragment thereof comprises:
[0486] a) a VH polypeptide sequence having at least 95% sequence identity to SEQ ID NO:2595 or to SEQ ID NO:2632, and a VL polypeptide sequence having at least 95% sequence identity to SEQ ID NO:2606 or to SEQ ID NO:2643; or
[0487] b) a VH polypeptide sequence having at least 95% sequence identity to SEQ ID NO:2595 or to SEQ ID NO:2675, and a VL polypeptide sequence having at least 95% sequence identity to SEQ ID NO:2662 or to SEQ ID NO:2686.

[0488] In some embodiments, the antibody or antigen-binding fragment thereof comprises:
[0489] a) a heavy chain variable region CDR1 comprising SEQ ID NO:2589; a heavy chain variable region CDR2 comprising SEQ ID NO:2587; a heavy chain variable region CDR3 comprising SEQ ID NO:2588; a light chain variable region CDR1 comprising SEQ ID NO:2599; a light chain variable region CDR2 comprising SEQ ID NO:2600; and a light chain variable region CDR3 comprising SEQ ID NO:2601; b) a heavy chain variable region CDR1 comprising SEQ ID NO:2626; a heavy chain variable region CDR2 comprising SEQ ID NO:2624; a heavy chain variable region CDR3 comprising SEQ ID NO:2625; a light chain variable region CDR1 comprising SEQ ID NO:2636; a light chain variable region CDR2 comprising, e.g., consisting of SEQ ID NO:2637; and a light chain variable region CDR3 comprising SEQ ID NO:2638; c) a heavy chain variable region CDR1 comprising SEQ ID NO:2589; a heavy chain variable region CDR2 comprising SEQ ID NO:2587; a heavy chain variable region CDR3 comprising SEQ ID NO:2588; a light chain variable region CDR1 comprising SEQ ID NO:2599; a light chain variable region CDR2 comprising SEQ ID NO:2600; and a light chain variable region CDR3 comprising SEQ ID NO:2660; or d) a heavy chain variable region CDR1 comprising SEQ ID NO:2669; a heavy chain variable region CDR2 comprising SEQ ID NO:2667; a heavy chain variable region CDR3 comprising SEQ ID NO:2668; a light chain variable region CDR1 comprising SEQ ID NO:2679; a light chain variable region CDR2 comprising SEQ ID NO:2680; and a light chain variable region CDR3 comprising SEQ ID NO:2681.

[0490] In some embodiments, the antibody or antigen-binding fragment thereof comprises:
[0491] a) a heavy chain variable region CDR1 of SEQ ID NO:2590; a heavy chain variable region CDR2 comprising SEQ ID NO:2591; a heavy chain variable region CDR3 comprising SEQ ID NO:2588; a light chain variable region CDR1 comprising SEQ ID NO:2602; a light chain variable region CDR2 comprising SEQ ID NO:2603; and a light chain variable region CDR3 comprising SEQ ID NO:2604;
[0492] b) a heavy chain variable region CDR1 comprising SEQ ID NO:2627; a heavy chain variable region CDR2 comprising SEQ ID NO:2628; a heavy chain variable region CDR3 comprising SEQ ID NO:2625; a light chain variable region CDR1 comprising SEQ ID NO:2639; a light chain variable region CDR2 comprising SEQ ID NO:2640; and a light chain variable region CDR3 comprising SEQ ID NO:2641;
[0493] c) a heavy chain variable region CDR1 comprising SEQ ID NO:2590; a heavy chain variable region CDR2 comprising SEQ ID NO:2591; a heavy chain variable region CDR3 comprising SEQ ID NO:2588; a light chain variable region CDR1 comprising SEQ ID NO:2602; a light chain variable region CDR2 comprising SEQ ID NO:2603; and a light chain variable region CDR3 comprising SEQ ID NO:2661; or
[0494] d) a heavy chain variable region CDR1 comprising SEQ ID NO:2670; a heavy chain variable region CDR2 comprising SEQ ID NO:2671; a heavy chain variable region CDR3 comprising SEQ ID NO:2668; a light chain variable region CDR1 comprising SEQ ID NO:2682; a light chain variable region CDR2 comprising SEQ ID NO:2683; and a light chain variable region CDR3 comprising SEQ ID NO:2684.

[0495] In some embodiments, the antibody or antigen-binding fragment thereof comprises:
[0496] a) a heavy chain variable region CDR1 comprising SEQ ID NO:2592; a heavy chain variable region CDR2 comprising SEQ ID NO:2593; a heavy chain variable region CDR3 comprising SEQ ID NO:2594; a light chain variable region CDR1 comprising SEQ ID NO:2605; a light chain variable region CDR2 comprising SEQ ID NO:2603; and a light chain variable region CDR3 comprising SEQ ID NO:2601;
[0497] b) a heavy chain variable region CDR1 comprising SEQ ID NO:2629; a heavy chain variable region CDR2 comprising SEQ ID NO:2630; a heavy chain variable region CDR3 comprising SEQ ID NO:2631; a light chain variable region CDR1 comprising SEQ ID NO:2642; a light chain variable region CDR2 comprising SEQ ID NO:2640; and a light chain variable region CDR3 comprising SEQ ID NO:2638;
[0498] c) a heavy chain variable region CDR1 comprising SEQ ID NO:2592; a heavy chain variable region CDR2 comprising SEQ ID NO:2593; a heavy chain variable region CDR3 comprising SEQ ID NO:2594; a light chain variable region CDR1 comprising SEQ ID NO:2605; a light chain variable region CDR2 comprising SEQ ID NO:2603; and a light chain variable region CDR3 comprising SEQ ID NO:2660; or
[0499] d) a heavy chain variable region CDR1 comprising SEQ ID NO:2672; a heavy chain variable region CDR2 comprising SEQ ID NO:2673; a heavy chain variable region CDR3 comprising SEQ ID NO:2674; a light chain variable region CDR1 comprising SEQ ID NO:2685; a light chain variable region CDR2 comprising SEQ ID NO:2683; and a light chain variable region CDR3 comprising SEQ ID NO:2681.

[0500] In some embodiments, the antibody or antigen-binding fragment thereof comprises:
[0501] a) a heavy chain variable region CDR1 comprising SEQ ID NO:2586; a heavy chain variable region CDR2 comprising SEQ ID NO:2587; a heavy chain variable region CDR3 comprising SEQ ID NO:2588; a light chain variable region CDR1 comprising SEQ ID NO:2599; a light chain variable region CDR2 comprising SEQ ID NO:2600; and a light chain variable region CDR3 comprising SEQ ID NO:2601;
[0502] b) a heavy chain variable region CDR1 comprising SEQ ID NO:2623; a heavy chain variable region CDR2 comprising SEQ ID NO:2624; a heavy chain variable region CDR3 comprising SEQ ID NO:2625; a light chain variable region CDR1 comprising SEQ ID NO:2636; a light chain variable region CDR2 comprising SEQ ID NO:2637; and a light chain variable region CDR3 comprising SEQ ID NO:2638;
[0503] c) a heavy chain variable region CDR1 comprising SEQ ID NO:2586; a heavy chain variable region CDR2 comprising SEQ ID NO:2587; a heavy chain variable region CDR3 comprising SEQ ID NO:2588; a light chain variable region CDR1 comprising SEQ ID NO:2599; a light chain variable region CDR2 comprising SEQ ID NO:2600; and a light chain variable region CDR3 comprising SEQ ID NO:2660; or
[0504] d) a heavy chain variable region CDR1 comprising SEQ ID NO:2666; a heavy chain variable region CDR2 comprising SEQ ID NO:2667; a heavy chain variable region CDR3 comprising SEQ ID NO:2668; a light chain variable region CDR1 comprising SEQ ID NO:2679; a light chain variable region CDR2 comprising SEQ ID NO:2680; and a light chain variable region CDR3 comprising SEQ ID NO:2681.

[0505] In some embodiments, the antibody or antigen-binding fragment thereof comprises:
[0506] a) a VH comprising SEQ ID NO:2595 and a VL comprising SEQ ID NO:2606; or
[0507] b) a VH comprising SEQ ID NO:2632 and a VL comprising SEQ ID NO:2643; or
[0508] c) a VH comprising a sequence having at least 95% homology to SEQ ID NO:2595 and a VL comprising a sequence having at least 95% homology to SEQ ID NO:2606; or
[0509] d) a VH comprising a sequence having at least 95% homology to SEQ ID NO:2632 and a VL comprising a sequence having at least 95% homology to SEQ ID NO:2643; or
[0510] e) a VH comprising, e.g. consisting of, a sequence that differs by at least 1, 2, 3, 4, 5, or 6 amino acids from SEQ ID NO:2595 and a VL comprising, e.g. consisting of, a sequence that differs by at least 1, 2, 3, 4, 5, or 6 amino acids from SEQ ID NO:2606; or
[0511] f) a VH comprising, e.g. consisting of, a sequence that differs by at least 1, 2, 3, 4, 5, or 6 amino acids from SEQ ID NO:2632 and a VL comprising, e.g. consisting of, a sequence that differs by at least 1, 2, 3, 4, 5, or 6 amino acids from SEQ ID NO:2643. g) a VH comprising SEQ ID NO:2595 and a VL comprising SEQ ID NO:2662; or
[0512] h) a VH comprising SEQ ID NO:2675 and a VL comprising SEQ ID NO:2686; or
[0513] i) a VH comprising a sequence having at least 95% homology to SEQ ID NO:2595 and a VL comprising a sequence having at least 95% homology to SEQ ID NO:2662; or
[0514] j) a VH comprising a sequence having at least 95% homology to SEQ ID NO:2675 and a VL comprising a sequence having at least 95% homology to SEQ ID NO:2686; or
[0515] k) a VH comprising, e.g. consisting of, a sequence that differs by at least 1, 2, 3, 4, 5, or 6 amino acids from SEQ ID NO:2595 and a VL comprising, e.g. consisting of, a sequence that differs by at least 1, 2, 3, 4, 5, or 6 amino acids from SEQ ID NO:2662; or
[0516] l) a VH comprising, e.g. consisting of, a sequence that differs by at least 1, 2, 3, 4, 5, or 6 amino acids from SEQ ID NO:2675 and a VL comprising, e.g. consisting of, a sequence that differs by at least 1, 2, 3, 4, 5, or 6 amino acids from SEQ ID NO:2686.

[0517] In some embodiments, the antibody or antigen-binding fragment thereof comprises:
[0518] a) a heavy chain amino acid sequence comprising SEQ ID NO:2597, SEQ ID NO:2611, SEQ ID NO:2615, SEQ ID NO:2617, SEQ ID NO:2619, or SEQ ID NO:2621, and a light chain amino acid sequence comprising SEQ ID NO:2608; b) a heavy chain amino acid sequence comprising SEQ ID NO:2634, SEQ ID NO:2648, SEQ ID NO:2652, SEQ ID NO:2654, SEQ ID NO:2656, or SEQ ID NO:2658, and a light chain amino acid sequence comprising SEQ ID NO:2645; c) a heavy chain amino acid sequence having at least 95% sequence identity to SEQ ID NO:2597, SEQ ID NO:2611, SEQ ID NO:2615, SEQ ID NO:2617, SEQ ID NO:2619, or SEQ ID NO:2621, and a light chain amino acid sequence having at least 95% sequence identity to SEQ ID NO:2608;
[0519] d) a heavy chain amino acid sequence having at least 95% sequence identity to SEQ ID NO:2634, SEQ ID NO:2648, SEQ ID NO:2652, SEQ ID NO:2654, SEQ ID NO:2656, or SEQ ID NO:2658, and a light chain amino acid sequence having at least 95% sequence identity to SEQ ID NO:2645;
[0520] e) a heavy chain amino acid sequence comprising SEQ ID NO:2597, and a light chain amino acid sequence comprising SEQ ID NO:2664;
[0521] f) a heavy chain amino acid sequence comprising SEQ ID NO:2677, and a light chain amino acid sequence comprising SEQ ID NO:2688;
[0522] g) a heavy chain amino acid sequence having at least 95% sequence identity to SEQ ID NO:2597, and a light chain amino acid sequence having at least 95% sequence identity to SEQ ID NO:2664; or
[0523] h) a heavy chain amino acid sequence having at least 95% sequence identity to SEQ ID NO:2677, and a light chain amino acid sequence having at least 95% sequence identity to SEQ ID NO:2688.

[0524] In some embodiments, the antibody or antigen-binding fragment thereof comprises:
[0525] a) a heavy chain sequence comprising SEQ ID NO:2597 and a light chain sequence comprising SEQ ID NO:2608;
[0526] b) a heavy chain sequence comprising SEQ ID NO:2611 and a light chain sequence comprising SEQ ID NO:2608;
[0527] c) a heavy chain sequence comprising SEQ ID NO:2615 and a light chain sequence comprising SEQ ID NO:2608;
[0528] d) a heavy chain sequence comprising SEQ ID NO:2617 and a light chain sequence comprising SEQ ID NO:2608;
[0529] e) a heavy chain sequence comprising SEQ ID NO:2619 and a light chain sequence comprising SEQ ID NO:2608;
[0530] f) a heavy chain sequence comprising SEQ ID NO:2621 and a light chain sequence comprising SEQ ID NO:2608;
[0531] g) a heavy chain sequence comprising SEQ ID NO:2634 and a light chain sequence comprising SEQ ID NO:2645;
[0532] h) a heavy chain sequence comprising SEQ ID NO:2648 and light chain sequence comprising SEQ ID NO:2645;
[0533] i) a heavy chain sequence comprising SEQ ID NO:2652 and light chain sequence comprising SEQ ID NO:2645;
[0534] j) a heavy chain sequence comprising SEQ ID NO:2654 and light chain sequence comprising SEQ ID NO:2645;
[0535] k) a heavy chain sequence comprising SEQ ID NO:2656 and light chain sequence comprising SEQ ID NO:2645;
[0536] l) a heavy chain sequence comprising SEQ ID NO:2658 and light chain sequence comprising SEQ ID NO:2645;
[0537] m) a heavy chain sequence comprising SEQ ID NO:2597 and light chain sequence comprising SEQ ID NO:2664; or
[0538] n) a heavy chain sequence comprising SEQ ID NO:2677 and light chain sequence comprising SEQ ID NO:2688.

[0539] In some embodiments, the antibody is an antibody disclosed in Table 1 of PCT Patent Application Publication No. WO2020/079580A1, reproduced below as TABLE J1.

TABLE J1
Sequences of Exemplary Monoclonal Antibodies That Bind Human TREM2

| | |
|---|---|
| Description | Sequence |

MOR44698A

| | |
|---|---|
| HCDR1 | GYTFTGYHMS (SEQ ID NO: 2586) |
| (Combined) | |
| HCDR2 | VINPVSGNTVYAQKFQG (SEQ ID NO: 2587) |
| (Combined) | |
| HCDR3 | IPSYTYAFDY (SEQ ID NO: 2588) |
| (Combined) | |
| HCDR1 | GYHMS (SEQ ID NO: 2589) |
| (Kabat) | |
| HCDR2 | VINPVSGNTVYAQKFQG (SEQ ID NO: 2587) |
| (Kabat) | |
| HCDR3 | IPSYTYAFDY (SEQ ID NO: 2588) |
| (Kabat) | |
| HCDR1 | GYTFTGY (SEQ ID NO: 2590) |
| (Chothia) | |
| HCDR2 | NPVSGN (SEQ ID NO: 2591) |
| (Chothia) | |
| HCDR3 | IPSYTYAFDY (SEQ ID NO: 2588) |
| (Chothia) | |
| HCDR1 | GYTFTGYH (SEQ ID NO: 2592) |
| (IMGT) | |
| HCDR2 | INPVSGNT (SEQ ID NO: 2593) |
| (IMGT) | |
| HCDR3 | ARIPSYTYAFDY (SEQ ID NO: 2594) |
| (IMGT) | |
| VH | QVQLVQSGAEVKKPGASVKVSCKASGYTFTGYHMSWVRQAPGQGLEWMGV |
| | INPVSGNTVYAQKFQGRVTMTRDTSISTAYMELSRLRSEDTAVYYCARIPSYT |
| | YAFDYWGQGTLVTVSS (SEQ ID NO: 2595) |
| DNA VH | CAGGTGCAATTGGTGCAGAGCGGTGCGGAAGTGAAAAAACCGGGTGCCAG |
| | CGTGAAAGTTAGCTGCAAAGCGTCCGGATATACCTTCACTGGTTACCATAT |
| | GTCTTGGGTGCGCCAGGCCCCGGGCCAGGGCCTCGAGTGGATGGGCGTTAT |
| | CAACCCGGTTTCTGGCAACACGGTTTACGCGCAGAAATTTCAGGGCCGGGT |
| | GACCATGACCCGTGATACCAGCATTAGCACCGCGTATATGGAACTGAGCC |
| | GTCTGCGTAGCGAAGATACGGCCGTGTATTATTGCGCGCGTATCCCGTCTT |
| | ACACTTACGCTTTCGATTACTGGGGCCAAGGCACCCTGGTGACTGTTAGCT |
| | CA (SEQ ID NO: 2596) |
| Heavy Chain | QVQLVQSGAEVKKPGASVKVSCKASGYTFTGYHMSWVRQAPGQGLEWMGV |
| | INPVSGNTVYAQKFQGRVTMTRDTSISTAYMELSRLRSEDTAVYYCARIPSYT |
| | YAFDYWGQGTLVTVSSASTKGPSVFPLAPSSKSTSGGTAALGCLVKDYFPEPV |
| | TVSWNSGALTSGVHTFPAVLQSSGLYSLSSVVTVPSSSLGTQTYICNVNHKPSN |
| | TKVDKRVEPKSCDKTHTCPPCPAPEAAGGPSVFLFPPKPKDTLMISRTPEVTCV |
| | VVDVSHEDPEVKFNWYVDGVEVHNAKTKPREEQYNSTYRVVSVLTVLHQD |
| | WLNGKEYKCKVSNKALPAPIEKTISKAKGQPREPQVYTLPPSREEMTKNQVSL |
| | TCLVKGFYPSDIAVEWESNGQPENNYKTTPPVLDSDGSFFLYSKLTVDKSRWQ |
| | QGNVFSCSVMHEALHNHYTQKSLSLSPGK (SEQ ID NO: 2597) |
| DNA Heavy | CAGGTGCAATTGGTGCAGAGCGGTGCGGAAGTGAAAAAACCGGGTGCCAG |
| Chain | CGTGAAAGTTAGCTGCAAAGCGTCCGGATATACCTTCACTGGTTACCATAT |
| | GTCTTGGGTGCGCCAGGCCCCGGGCCAGGGCCTCGAGTGGATGGGCGTTAT |
| | CAACCCGGTTTCTGGCAACACGGTTTACGCGCAGAAATTTCAGGGCCGGGT |
| | GACCATGACCCGTGATACCAGCATTAGCACCGCGTATATGGAACTGAGCC |
| | GTCTGCGTAGCGAAGATACGGCCGTGTATTATTGCGCGCGTATCCCGTCTT |
| | ACACTTACGCTTTCGATTACTGGGGCCAAGGCACCCTGGTGACTGTTAGCT |
| | CAGCCTCCACCAAGGGTCCATCGGTCTTCCCCCTGGCACCCTCCTCCAAGA |
| | GCACCTCTGGGGGCACAGCGGCCCTGGGCTGCCTGGTCAAGGACTACTTCC |
| | CCGAACCGGTGACGGTGTCGTGGAACTCAGGCGCCCTGACCAGCGGCGTG |
| | CACACCTTCCCGGCTGTCCTACAGTCCTCAGGACTCTACTCCCTCAGCAGC |
| | GTGGTGACCGTGCCCTCCAGCAGCTTGGGCACCCAGACCTACATCTGCAAC |
| | GTGAATCACAAGCCCAGCAACACCAAGGTGGACAAGAGAGTTGAGCCCAA |
| | ATCTTGTGACAAAACTCACACATGCCCACCGTGCCCAGCACCTGAAGCAGC |
| | GGGGGGACCGTCAGTCTTCCTCTTCCCCCCAAAACCCAAGGACACCCTCAT |
| | GATCTCCCGGACCCCTGAGGTCACATGCGTGGTGGTGGACGTGAGCCACG |
| | AAGACCCTGAGGTCAAGTTCAACTGGTACGTGGACGGCGTGGAGGTGCAT |
| | AATGCCAAGACAAAGCCGCGGGAGGAGCAGTACAACAGCACGTACCGGGT |
| | GGTCAGCGTCCTCACCGTCCTGCACCAGGACTGGCTGAATGGCAAGGAGT |
| | ACAAGTGCAAGGTCTCCAACAAAGCCCTCCCAGCCCCCATCGAGAAAACC |
| | ATCTCCAAAGCCAAAGGGCAGCCCCGAGAACCACAGGTGTACACCCTGCC |
| | CCCATCCCGGGAGGAGATGACCAAGAACCAGGTCAGCCTGACCTGCCTGG |
| | TCAAAGGCTTCTATCCCAGCGACATCGCCGTGGAGTGGGAGAGCAATGGG |
| | CAGCCGGAGAACAACTACAAGACCACGCCTCCCGTGCTGGACTCCGACGG |
| | CTCCTTCTTCCTCTACAGCAAGCTCACCGTGGACAAGAGCAGGTGGCAGCA |
| | GGGGAACGTCTTCTCATGCTCCGTGATGCATGAGGCTCTGCACAACCACTA |
| | CACGCAGAAGAGCCTCTCCCTGTCTCCGGGTAAA (SEQ ID NO: 2598) |
| LCDR1 | RASQDISNYLA (SEQ ID NO: 2599) |
| (Combined) | |
| LCDR2 | RASSLQS (SEQ ID NO: 2600) |
| (Combined) | |
| LCDR3 | FQYRHMPSQT (SEQ ID NO: 2601) |
| (Combined) | |
| LCDR1 | RASQDISNYLA (SEQ ID NO: 2599) |
| (Kabat) | |
| LCDR2 | RASSLQS (SEQ ID NO: 2600) |
| (Kabat) | |
| LCDR3 | FQYRHMPSQT (SEQ ID NO: 2601) |
| (Kabat) | |
| LCDR1 | SQDISNY (SEQ ID NO: 2602) |
| (Chothia) | |
| LCDR2 | RAS (SEQ ID NO: 2603) |
| (Chothia) | |
| LCDR3 | YRHMPSQ (SEQ ID NO: 2604) |
| (Chothia) | |
| LCDR1 | QDISNY (SEQ ID NO: 2605) |
| (IMGT) | |
| LCDR2 | RAS (SEQ ID NO: 2603) |
| (IMGT) | |
| LCDR3 | FQYRHMPSQT (SEQ ID NO: 2601) |
| (IMGT) | |
| VL | DIQMTQSPSSLSASVGDRVTITCRASQDISNYLAWYQQKPGKAPKLLIYRASSL |
| | QSGVPSRFSGSGSGTDFTLTISSLQPEDFATYYCFQYRHMPSQTFGQGTKVEIK |
| | (SEQ ID NO: 2606) |
| DNA VL | GATATCCAGATGACCCAGAGCCCGAGCAGCCTGAGCGCCAGCGTGGGCGA |
| | TCGCGTGACCATTACCTGCAGAGCCAGCCAGGACATTTCTAACTACCTGGC |
| | TTGGTACCAGCAGAAACCGGGCAAAGCGCCGAAACTATTAATCTACCGTG |
| | CTTCTTCTCTGCAAAGCGGCGTGCCGAGCCGCTTTAGCGGCAGCGGATCCG |
| | GCACCGATTTCACCCTGACCATTAGCTCTCTGCAACCGGAAGACTTTGCGA |
| | CCTATTATTGCTTCCAGTACCGTCATATGCCGTCTCAGACCTTTGGCCAGGG |
| | CACGAAAGTTGAAATTAAA (SEQ ID NO: 2607) |
| Light Chain | DIQMTQSPSSLSASVGDRVTITCRASQDISNYLAWYQQKPGKAPKLLIYRASSL |
| | QSGVPSRFSGSGSGTDFTLTISSLQPEDFATYYCFQYRHMPSQTFGQGTKVEIK |
| | RTVAAPSVFIFPPSDEQLKSGTASVVCLLNNFYPREAKVQWKVDNALQSGNSQ |
| | ESVTEQDSKDSTYSLSSTLTLSKADYEKHKVYACEVTHQGLSSPVTKSFNRGE |
| | C (SEQ ID NO: 2608) |
| DNA Light | GATATCCAGATGACCCAGAGCCCGAGCAGCCTGAGCGCCAGCGTGGGCGA |
| Chain | TCGCGTGACCATTACCTGCAGAGCCAGCCAGGACATTTCTAACTACCTGGC |
| | TTGGTACCAGCAGAAACCGGGCAAAGCGCCGAAACTATTAATCTACCGTG |
| | CTTCTTCTCTGCAAAGCGGCGTGCCGAGCCGCTTTAGCGGCAGCGGATCCG |
| | GCACCGATTTCACCCTGACCATTAGCTCTCTGCAACCGGAAGACTTTGCGA |
| | CCTATTATTGCTTCCAGTACCGTCATATGCCGTCTCAGACCTTTGGCCAGGG |
| | CACGAAAGTTGAAATTAAACGTACGGTGGCCGCTCCCAGCGTGTTCATCTT |
| | CCCCCCCAGCGACGAGCAGCTGAAGAGCGGCACCGCCAGCGTGGTGTGCC |
| | TGCTGAACAACTTCTACCCCCGGGAGGCCAAGGTGCAGTGGAAGGTGGAC |
| | AACGCCCTGCAGAGCGGCAACAGCCAGGAAAGCGTCACCGAGCAGGACA |
| | GCAAGGACTCCACCTACAGCCTGAGCAGCACCCTGACCCTGAGCAAGGCC |
| | GACTACGAGAAGCACAAGGTGTACGCCTGCGAGGTGACCCACCAGGGCCT |
| | GTCCAGCCCCGTGACCAAGAGCTTCAACCGGGGCGAGTGT (SEQ ID NO: 2609) |

MOR44698B

| | |
|---|---|
| HCDR1 | GYTFTGYHMS (SEQ ID NO: 2586) |
| (Combined) | |
| HCDR2 | VINPVSGNTVYAQKFQG (SEQ ID NO: 2587) |
| (Combined) | |
| HCDR3 | IPSYTYAFDY (SEQ ID NO: 2588) |
| (Combined) | |
| HCDR1 | GYHMS (SEQ ID NO: 2589) |
| (Kabat) | |
| HCDR2 | VINPVSGNTVYAQKFQG (SEQ ID NO: 2587) |
| (Kabat) | |
| HCDR3 | IPSYTYAFDY (SEQ ID NO: 2588) |
| (Kabat) | |
| HCDR1 | GYTFTGY (SEQ ID NO: 2590) |
| (Chothia) | |
| HCDR2 | NPVSGN (SEQ ID NO: 2591) |
| (Chothia) | |
| HCDR3 | IPSYTYAFDY (SEQ ID NO: 2588) |
| (Chothia) | |
| HCDR1 | GYTFTGYH (SEQ ID NO: 2592) |
| (IMGT) | |
| HCDR2 | INPVSGNT (SEQ ID NO: 2593) |
| (IMGT) | |
| HCDR3 | ARIPSYTYAFDY (SEQ ID NO: 2594) |
| (IMGT) | |
| VH | QVQLVQSGAEVKKPGASVKVSCKASGYTFTGYHMSWVRQAPGQGLEWMGV |
| | INPVSGNTVYAQKFQGRVTMTRDTSISTAYMELSRLRSEDTAVYYCARIPSYT |
| | YAFDYWGQGTLVTVSS (SEQ ID NO: 2595) |
| DNA VH | CAAGTGCAACTCGTGCAGTCAGGAGCCGAAGTCAAGAAGCCTGGAGCCTC |
| | GGTCAAGGTGTCCTGCAAGGCCAGCGGATACACTTTCACTGGATACCACAT |
| | GTCGTGGGTCAGACAGGCTCCTGGCCAAGGGCTGGAGTGGATGGGCGTCA |
| | TCAACCCGGTGTCGGGTAATACCGTGTACGCCCAGAAGTTCCAGGGTCGCG |
| | TGACCATGACCCGGGATACCTCCATTAGCACCGCGTACATGGAGCTCAGCC |
| | GGTTGAGATCCGAGGATACCGCCGTGTACTACTGTGCGCGGATCCCGTCCT |
| | ACACTTACGCCTTCGACTATTGGGGCCAGGGGACTCTTGTCACCGTGTCCT |
| | CG (SEQ ID NO: 2610) |
| Heavy Chain | QVQLVQSGAEVKKPGASVKVSCKASGYTFTGYHMSWVRQAPGQGLEWMGV |
| | INPVSGNTVYAQKFQGRVTMTRDTSISTAYMELSRLRSEDTAVYYCARIPSYT |
| | YAFDYWGQGTLVTVSSASTKGPSVFPLAPSSKSTSGGTAALGCLVKDYFPEPV |
| | TVSWNSGALTSGVHTFPAVLQSSGLYSLSSVVTVPSSSLGTQTYICNVNHKPSN |
| | TKVDKRVEPKSCDKTHTCPPCPAPELLGGPSVFLFPPKPKDTLMISRTPEVTCV |
| | VVDVSHEDPEVKFNWYVDGVEVHNAKTKPREEQYNSTYRVVSVLTVLHQD |
| | WLNGKEYKCKVSNKALPAPIEKTISKAKGQPREPQVYTLPPSREEMTKNVSL |
| | TCLVKGFYPSDIAVEWESNGQPENNYKTTPPVLDSDGSFFLYSKLTVDKSRWQ |
| | QGNVFSCSVMHEALHNHYTQKSLSLSPGK (SEQ ID NO: 2611) |
| DNA Heavy | CAAGTGCAACTCGTGCAGTCAGGAGCCGAAGTCAAGAAGCCTGGAGCCTC |
| Chain | GGTCAAGGTGTCCTGCAAGGCCAGCGGATACACTTTCACTGGATACCACAT |
| | GTCGTGGGTCAGACAGGCTCCTGGCCAAGGGCTGGAGTGGATGGGCGTCA |
| | TCAACCCGGTGTCGGGTAATACCGTGTACGCCCAGAAGTTCCAGGGTCGCG |
| | TGACCATGACCCGGGATACCTCCATTAGCACCGCGTACATGGAGCTCAGCC |
| | GGTTGAGATCCGAGGATACCGCCGTGTACTACTGTGCGCGGATCCCGTCCT |
| | ACACTTACGCCTTCGACTATTGGGGCCAGGGGACTCTTGTCACCGTGTCCT |
| | CGGCCTCCACTAAGGGCCCAAGTGTGTTTCCCCTGGCCCCCAGCAGCAAGT |
| | CTACTTCCGGCGGAACTGCTGCCCTGGGTTGCCTGGTGAAGGACTACTTCC |
| | CCGAGCCCGTGACAGTGTCCTGGAACTCTGGGGCTCTGACTTCCGGCGTGC |
| | ACACCTTCCCCGCCGTGCTGCAGAGCAGCGGCCTGTACAGCCTGAGCAGCG |
| | TGGTGACAGTGCCCTCCAGCTCTCTGGGAACCCAGACCTATATCTGCAACG |
| | TGAACCACAAGCCCAGCAACACCAAGGTGGACAAGAGAGTGGAGCCCAA |
| | GAGCTGCGACAAGACCCACACCTGCCCCCCCTGCCCAGCTCCAGAACTGCT |
| | GGGAGGGCCTTCCGTGTTCCTGTTCCCCCCCAAGCCCAAGGACACCCTGAT |
| | GATCAGCAGGACCCCCGAGGTGACCTGCGTGGTGGTGGACGTGTCCCACG |
| | AGGACCCAGAGGTGAAGTTCAACTGGTACGTGGACGGCGTGGAGGTGCAC |
| | AACGCCAAGACCAAGCCCAGAGAGGAGCAGTACAACAGCACCTACAGGGT |
| | GGTGTCCGTGCTGACCGTGCTGCACCAGGACTGGCTGAACGGCAAAGAAT |
| | ACAAGTGCAAAGTCTCCAACAAGGCCCTGCCAGCCCCAATCGAAAAGACA |
| | ATCAGCAAGGCCAAGGGCCAGCCACGGGAGCCCCAGGTGTACACCCTGCC |
| | CCCCAGCCGGGAGGAGATGACCAAGAACCAGGTGTCCCTGACCTGTCTGG |
| | TGAAGGGCTTCTACCCCAGCGATATCGCCGTGGAGTGGGAGAGCAACGGC |
| | CAGCCCGAGAACAACTACAAGACCACCCCCCCAGTGCTGGACAGCGACGG |
| | CAGCTTCTTCCTGTACAGCAAGCTGACCGTGGACAAGTCCAGGTGGCAGCA |
| | GGGCAACGTGTTCAGCTGCAGCGTGATGCACGAGGCCCTGCACAACCACT |
| | ACACCCAGAAGTCCCTGAGCCTGAGCCCCGGCAAG (SEQ ID NO: 2612) |
| LCDR1 | RASQDISNYLA (SEQ ID NO: 2599) |
| (Combined) | |
| LCDR2 | RASSLQS (SEQ ID NO: 2600) |
| (Combined) | |
| LCDR3 | FQYRHMPSQT (SEQ ID NO: 2601) |
| (Combined) | |
| LCDR1 | RASQDISNYLA (SEQ ID NO: 2599) |
| (Kabat) | |
| LCDR2 | RASSLQS (SEQ ID NO: 2600) |
| (Kabat) | |
| LCDR3 | FQYRHMPSQT (SEQ ID NO: 2601) |
| (Kabat) | |
| LCDR1 | SQDISNY (SEQ ID NO: 2602) |
| (Chothia) | |
| LCDR2 | RAS (SEQ ID NO: 2603) |
| (Chothia) | |
| LCDR3 | YRHMPSQ (SEQ ID NO: 2604) |
| (Chothia) | |
| LCDR1 | QDISNY (SEQ ID NO: 2605) |
| (IMGT) | |
| LCDR2 | RAS (SEQ ID NO: 2603) |
| (IMGT) | |
| LCDR3 | FQYRHMPSQT (SEQ ID NO: 2601) |
| (IMGT) | |
| VL | DIQMTQSPSSLSASVGDRVTITCRASQDISNYLAWYQQKPGKAPKLLIYRASSL |
| | QSGVPSRFSGSGSGTDFTLTISSLQPEDFATYYCFQYRHMPSQTFGQGTKVEIK |
| | (SEQ ID NO: 2606) |
| DNA VL | GACATTCAGATGACCCAGTCCCCGTCGTCCCTGTCCGCATCCGTGGGCGAC |
| | AGAGTCACCATCACTTGCCGGGCCTCACAGGATATTTCCAACTACCTGGCC |
| | TGGTATCAGCAGAAGCCTGGAAAGGCCCCGAAGCTGCTGATCTACCGGGC |
| | GTCCTCCTTGCAATCGGGAGTGCCAAGCCGCTTTTCTGGTTCCGGGAGCGG |
| | GACTGACTTCACCCTGACTATTAGCAGCCTGCAGCCCGAAGATTTCGCTAC |
| | CTACTACTGCTTCCAGTACCGGCACATGCCCTCACAAACCTTCGGACAGGG |
| | CACCAAAGTCGAGATCAAG (SEQ ID NO: 2613) |
| Light Chain | DIQMTQSPSSLSASVGDRVTITCRASQDISNYLAWYQQKPGKAPKLLIYRASSL |
| | QSGVPSRFSGSGSGTDFTLTISSLQPEDFATYYCFQYRHMPSQTFGQGTKVEIK |
| | RTVAAPSVFIFPPSDEQLKSGTASVVCLLNNFYPREAKVQWKVDNALQSGNSQ |
| | ESVTEQDSKDSTYSLSSTLTLSKADYEKHKVYACEVTHQGLSSPVTKSFNRGE |
| | C (SEQ ID NO: 2608) |
| DNA Light | GACATTCAGATGACCCAGTCCCCGTCGTCCCTGTCCGCATCCGTGGGCGAC |
| Chain | AGAGTCACCATCACTTGCCGGGCCTCACAGGATATTTCCAACTACCTGGCC |
| | TGGTATCAGCAGAAGCCTGGAAAGGCCCCGAAGCTGCTGATCTACCGGGC |
| | GTCCTCCTTGCAATCGGGAGTGCCAAGCCGCTTTTCTGGTTCCGGGAGCGG |
| | GACTGACTTCACCCTGACTATTAGCAGCCTGCAGCCCGAAGATTTCGCTAC |
| | CTACTACTGCTTCCAGTACCGGCACATGCCCTCACAAACCTTCGGACAGGG |
| | CACCAAAGTCGAGATCAAGCGTACGGTGGCCGCTCCCAGCGTGTTCATCTT |
| | CCCCCCCAGCGACGAGCAGCTGAAGAGCGGCACCGCCAGCGTGGTGTGCC |
| | TGCTGAACAACTTCTACCCCCGGGAGGCCAAGGTGCAGTGGAAGGTGGAC |
| | AACGCCCTGCAGAGCGGCAACAGCCAGGAGAGCGTCACCGAGCAGGACA |
| | GCAAGGACTCCACCTACAGCCTGAGCAGCACCCTGACCCTGAGCAAGGCC |
| | GACTACGAGAAGCATAAGGTGTACGCCTGCGAGGTGACCCACCAGGGCCT |
| | GTCCAGCCCCGTGACCAAGAGCTTCAACAGGGGCGAGTGC (SEQ ID NO: 2614) |

MOR44698C

| | |
|---|---|
| HCDR1 | GYTFTGYHMS (SEQ ID NO: 2586) |
| (Combined) | |
| HCDR2 | VINPVSGNTVYAQKFQG (SEQ ID NO: 2587) |
| (Combined) | |
| HCDR3 | IPSYTYAFDY (SEQ ID NO: 2588) |
| (Combined) | |
| HCDR1 | GYHMS (SEQ ID NO: 2589) |
| (Kabat) | |
| HCDR2 | VINPVSGNTVYAQKFQG (SEQ ID NO: 2587) |
| (Kabat) | |
| HCDR3 | IPSYTYAFDY (SEQ ID NO: 2588) |
| (Kabat) | |
| HCDR1 | GYTFTGY (SEQ ID NO: 2590) |
| (Chothia) | |
| HCDR2 | NPVSGN (SEQ ID NO: 2591) |
| (Chothia) | |
| HCDR3 | IPSYTYAFDY (SEQ ID NO: 2588) |
| (Chothia) | |
| HCDR1 | GYTFTGYH (SEQ ID NO: 2592) |
| (IMGT) | |
| HCDR2 | INPVSGNT (SEQ ID NO: 2593) |
| (IMGT) | |
| HCDR3 | ARIPSYTYAFDY (SEQ ID NO: 2594) |
| (IMGT) | |
| VH | QVQLVQSGAEVKKPGASVKVSCKASGYTFTGYHMSWVRQAPGQGLEWMGV |
| | INPVSGNTVYAQKFQGRVTMTRDTSISTAYMELSRLRSEDTAVYYCARIPSYT |
| | YAFDYWGQGTLVTVSS (SEQ ID NO: 2595) |
| DNA VH | CAAGTGCAACTCGTGCAGTCAGGAGCCGAAGTCAAGAAGCCTGGAGCCTC |
| | GGTCAAGGTGTCCTGCAAGGCCAGCGGATACACTTTCACTGGATACCACAT |
| | GTCGTGGGTCAGACAGGCTCCTGGCCAAGGGCTGGAGTGGATGGGCGTCA |
| | TCAACCCGGTGTCGGGTAATACCGTGTACGCCCAGAAGTTCCAGGGTCGCG |
| | TGACCATGACCCGGGATACCTCCATTAGCACCGCGTACATGGAGCTCAGCC |
| | GGTTGAGATCCGAGGATACCGCCGTGTACTACTGTGCGCGGATCCCGTCCT |
| | ACACTTACGCCTTCGACTATTGGGGCCAGGGGACTCTTGTCACCGTGTCCT |
| | CG (SEQ ID NO: 2610) |
| Heavy Chain | QVQLVQSGAEVKKPGASVKVSCKASGYTFTGYHMSWVRQAPGQGLEWMGV |
| | INPVSGNTVYAQKFQGRVTMTRDTSISTAYMELSRLRSEDTAVYYCARIPSYT |
| | YAFDYWGQGTLVTVSSASTKGPSVFPLAPSSKSTSGGTAALGCLVKDYFPEPV |
| | TVSWNSGALTSGVHTFPAVLQSSGLYSLSSVVTVPSSSLGTQTYICNVNHKPSN |
| | TKVDKRVEPKSCDKTHTCPPCPAPELLGGPSVFLFPPKPKDTLMISRTPEVTCV |
| | VVAVSHEDPEVKFNWYVDGVEVHNAKTKPREEQYNSTYRVVSVLTVLHQD |
| | WLNGKEYKCKVSNKALAAPIEKTISKAKGQPREPQVYTLPPSREEMTKNQVSL |
| | TCLVKGFYPSDIAVEWESNGQPENNYKTTPPVLDSDGSFFLYSKLTVDKSRWQ |
| | QGNVFSCSVMHEALHNHYTQKSLSLSPGK (SEQ ID NO: 2615) |
| DNA Heavy | CAAGTGCAACTCGTGCAGTCAGGAGCCGAAGTCAAGAAGCCTGGAGCCTC |
| Chain | GGTCAAGGTGTCCTGCAAGGCCAGCGGATACACTTTCACTGGATACCACAT |
| | GTCGTGGGTCAGACAGGCTCCTGGCCAAGGGCTGGAGTGGATGGGCGTCA |
| | TCAACCCGGTGTCGGGTAATACCGTGTACGCCCAGAAGTTCCAGGGTCGCG |
| | TGACCATGACCCGGGATACCTCCATTAGCACCGCGTACATGGAGCTCAGCC |
| | GGTTGAGATCCGAGGATACCGCCGTGTACTACTGTGCGCGGATCCCGTCCT |
| | ACACTTACGCCTTCGACTATTGGGGCCAGGGGACTCTTGTCACCGTGTCCT |
| | CGGCCTCCACTAAGGGCCCGTCAGTGTTCCCCCTTGCGCCATCCTCGAAGT |
| | CAACCTCCGGAGGAACTGCCGCACTGGGTTGCCTCGTGAAAGACTATTTCC |
| | CGGAACCCGTCACTGTCTCCTGGAACTCAGGAGCGCTCACCAGCGGAGTGC |
| | ATACCTTTCCTGCGGTGCTGCAGTCCAGCGGCCTGTACTCCCTGAGCTCCGT |
| | CGTGACCGTCCCCTCGTCGTCCCTGGGAACCCAAACCTACATTTGCAACGT |
| | CAATCACAAGCCAAGCAACACTAAGGTGGACAAGAGAGTGGAGCCCAAGT |
| | CCTGCGATAAGACCCACACCTGTCCTCCCTGTCCGGCACCTGAACTGCTTG |
| | GTGGACCTTCCGTGTTCCTGTTCCCGCCCAAGCCAAAAGACACCCTGATGA |
| | TCTCCCGCACTCCGGAAGTCACTTGCGTGGTCGTGGCCGTGTCCCACGAGG |
| | ACCCCGAGGTCAAGTTTAATTGGTACGTGGACGGAGTGGAAGTGCACAAC |
| | GCCAAGACCAAGCCGCGGGAAGAACAGTACAACTCCACCTACCGCGTGGT |
| | GTCCGTCCTGACTGTGCTCCACCAGGACTGGCTGAACGGAAAGGAGTACA |
| | AGTGCAAAGTGTCCAACAAGGCACTGGCTGCCCCTATCGAAAAGACTATCT |
| | CCAAGGCCAAGGGCCAACCTAGGGAGCCCCAGGTGTACACGTTGCCTCCTT |
| | CCCGCGAAGAAATGACTAAGAACCAGGTGTCGCTGACCTGTCTCGTGAAA |
| | GGGTTCTACCCCTCTGACATCGCCGTGGAATGGGAGTCAAACGGACAGCCT |
| | GAGAACAACTATAAGACCACACCACCTGTCCTGGACTCCGACGGCTCCTTC |
| | TTCCTGTACTCAAAGTTGACCGTGGACAAGTCGCGGTGGCAACAGGGCAAC |
| | GTGTTCTCTTGCTCCGTGATGCACGAAGCCCTGCACAACCACTACACCCAA |
| | AAGTCGCTCAGCCTCTCCCCCGGAAAG (SEQ ID NO: 2616) |
| LCDR1 | RASQDISNYLA (SEQ ID NO: 2599) |
| (Combined) | |
| LCDR2 | RASSLQS (SEQ ID NO: 2600) |
| (Combined) | |
| LCDR3 | FQYRHMPSQT (SEQ ID NO: 2601) |
| (Combined) | |
| LCDR1 | RASQDISNYLA (SEQ ID NO: 2599) |
| (Kabat) | |
| LCDR2 | RASSLQS (SEQ ID NO: 2600) |
| (Kabat) | |
| LCDR3 | FQYRHMPSQT (SEQ ID NO: 2601) |
| (Kabat) | |
| LCDR1 | SQDISNY (SEQ ID NO: 2602) |
| (Chothia) | |
| LCDR2 | RAS (SEQ ID NO: 2603) |
| (Chothia) | |
| LCDR3 | YRHMPSQ (SEQ ID NO: 2604) |
| (Chothia) | |
| LCDR1 | QDISNY (SEQ ID NO: 2605) |
| (IMGT) | |
| LCDR2 | RAS (SEQ ID NO: 2603) |
| (IMGT) | |
| LCDR3 | FQYRHMPSQT (SEQ ID NO: 2601) |
| (IMGT) | |
| VL | DIQMTQSPSSLSASVGDRVTITCRASQDISNYLAWYQQKPGKAPKLLIYRASSL |
| | QSGVPSRFSGSGSGTDFTLTISSLQPEDFATYYCFQYRHMPSQTFGQGTKVEIK |
| | (SEQ ID NO: 2606) |
| DNA VL | GACATTCAGATGACCCAGTCCCCGTCGTCCCTGTCCGCATCCGTGGGCGAC |
| | AGAGTCACCATCACTTGCCGGGCCTCACAGGATATTTCCAACTACCTGGCC |
| | TGGTATCAGCAGAAGCCTGGAAAGGCCCCGAAGCTGCTGATCTACCGGGC |
| | GTCCTCCTTGCAATCGGGAGTGCCAAGCCGCTTTTCTGGTTCCGGGAGCGG |
| | GACTGACTTCACCCTGACTATTAGCAGCCTGCAGCCCGAAGATTTCGCTAC |
| | CTACTACTGCTTCCAGTACCGGCACATGCCCTCACAAACCTTCGGACAGGG |
| | CACCAAAGTCGAGATCAAG (SEQ ID NO: 2613) |
| Light Chain | DIQMTQSPSSLSASVGDRVTITCRASQDISNYLAWYQQKPGKAPKLLIYRASSL |
| | QSGVPSRFSGSGSGTDFTLTISSLQPEDFATYYCFQYRHMPSQTFGQGTKVEIK |
| | RTVAAPSVFIFPPSDEQLKSGTASVVCLLNNFYPREAKVQWKVDNALQSGNSQ |
| | ESVTEQDSKDSTYSLSSTLTLSKADYEKHKVYACEVTHQGLSSPVTKSFNRGE |
| | C (SEQ ID NO: 2608) |
| DNA Light | GACATTCAGATGACCCAGTCCCCGTCGTCCCTGTCCGCATCCGTGGGCGAC |
| Chain | AGAGTCACCATCACTTGCCGGGCCTCACAGGATATTTCCAACTACCTGGCC |
| | TGGTATCAGCAGAAGCCTGGAAAGGCCCCGAAGCTGCTGATCTACCGGGC |
| | GTCCTCCTTGCAATCGGGAGTGCCAAGCCGCTTTTCTGGTTCCGGGAGCGG |
| | GACTGACTTCACCCTGACTATTAGCAGCCTGCAGCCCGAAGATTTCGCTAC |
| | CTACTACTGCTTCCAGTACCGGCACATGCCCTCACAAACCTTCGGACAGGG |
| | CACCAAAGTCGAGATCAAGCGTACGGTGGCCGCTCCCAGCGTGTTCATCTT |
| | CCCCCCCAGCGACGAGCAGCTGAAGAGCGGCACCGCCAGCGTGGTGTGCC |
| | TGCTGAACAACTTCTACCCCCGGGAGGCCAAGGTGCAGTGGAAGGTGGAC |
| | AACGCCCTGCAGAGCGGCAACAGCCAGGAGAGCGTCACCGAGCAGGACA |
| | GCAAGGACTCCACCTACAGCCTGAGCAGCACCCTGACCCTGAGCAAGGCC |
| | GACTACGAGAAGCATAAGGTGTACGCCTGCGAGGTGACCCACCAGGGCCT |
| | GTCCAGCCCCGTGACCAAGAGCTTCAACAGGGGCGAGTGC (SEQ ID NO: 2614) |

MOR44698D

| | |
|---|---|
| HCDR1 | GYTFTGYHMS (SEQ ID NO: 2586) |
| (Combined) | |
| HCDR2 | VINPVSGNTVYAQKFQG (SEQ ID NO: 2587) |
| (Combined) | |
| HCDR3 | IPSYTYAFDY (SEQ ID NO: 2588) |
| (Combined) | |
| HCDR1 | GYHMS (SEQ ID NO: 2589) |
| (Kabat) | |
| HCDR2 | VINPVSGNTVYAQKFQG (SEQ ID NO: 2587) |
| (Kabat) | |
| HCDR3 | IPSYTYAFDY (SEQ ID NO: 2588) |
| (Kabat) | |
| HCDR1 | GYTFTGY (SEQ ID NO: 2590) |
| (Chothia) | |
| HCDR2 | NPVSGN (SEQ ID NO: 2591) |
| (Chothia) | |
| HCDR3 | IPSYTYAFDY (SEQ ID NO: 2588) |
| (Chothia) | |
| HCDR1 | GYTFTGYH (SEQ ID NO: 2592) |
| (IMGT) | |
| HCDR2 | INPVSGNT (SEQ ID NO: 2593) |
| (IMGT) | |
| HCDR3 | ARIPSYTYAFDY (SEQ ID NO: 2594) |
| (IMGT) | |
| VH | QVQLVQSGAEVKKPGASVKVSCKASGYTFTGYHMSWVRQAPGQGLEWMGV |
| | INPVSGNTVYAQKFQGRVTMTRDTSISTAYMELSRLRSEDTAVYYCARIPSYT |
| | YAFDYWGQGTLVTVSS (SEQ ID NO: 2595) |
| DNA VH | CAAGTGCAACTCGTGCAGTCAGGAGCCGAAGTCAAGAAGCCTGGAGCCTC |
| | GGTCAAGGTGTCCTGCAAGGCCAGCGGATACACTTTCACTGGATACCACAT |
| | GTCGTGGGTCAGACAGGCTCCTGGCCAAGGGCTGGAGTGGATGGGCGTCA |
| | TCAACCCGGTGTCGGGTAATACCGTGTACGCCCAGAAGTTCCAGGGTCGCG |
| | TGACCATGACCCGGGATACCTCCATTAGCACCGCGTACATGGAGCTCAGCC |
| | GGTTGAGATCCGAGGATACCGCCGTGTACTACTGTGCGCGGATCCCGTCCT |
| | ACACTTACGCCTTCGACTATTGGGGCCAGGGGACTCTTGTCACCGTGTCCT |
| | CG (SEQ ID NO: 2610) |
| Heavy Chain | QVQLVQSGAEVKKPGASVKVSCKASGYTFTGYHMSWVRQAPGQGLEWMGV |
| | INPVSGNTVYAQKFQGRVTMTRDTSISTAYMELSRLRSEDTAVYYCARIPSYT |
| | YAFDYWGQGTLVTVSSASTKGPSVFPLAPSSKSTSGGTAALGCLVKDYFPEPV |
| | TVSWNSGALTSGVHTFPAVLQSSGLYSLSSVVTVPSSSLGTQTYICNVNHKPSN |
| | TKVDKRVEPKSCDKTHTCPPCPAPELLGGPSVFLFPPKPKDTLMISRTPEVTCV |
| | VVDVSHEDPEVKFNWYVDGVEVHNAKTKPREEQYNSTYRVVSVLTVLHQD |
| | WLNGKEYKCKVSNKALPAPIEKTISKAKGQPREPQVYTLPPSREEMTKNQVSL |
| | TCLVKGFYPSDIAVEWESNGQPENNYKTTPPVLDSDGSFFLYSKLTVDKSRWQ |
| | QGNVFSCSVLHEALHSHYTQKSLSLSPGK (SEQ ID NO: 2617) |
| DNA Heavy | CAAGTGCAACTCGTGCAGTCAGGAGCCGAAGTCAAGAAGCCTGGAGCCTC |
| Chain | GGTCAAGGTGTCCTGCAAGGCCAGCGGATACACTTTCACTGGATACCACAT |
| | GTCGTGGGTCAGACAGGCTCCTGGCCAAGGGCTGGAGTGGATGGGCGTCA |
| | TCAACCCGGTGTCGGGTAATACCGTGTACGCCCAGAAGTTCCAGGGTCGCG |
| | TGACCATGACCCGGGATACCTCCATTAGCACCGCGTACATGGAGCTCAGCC |
| | GGTTGAGATCCGAGGATACCGCCGTGTACTACTGTGCGCGGATCCCGTCCT |
| | ACACTTACGCCTTCGACTATTGGGGCCAGGGGACTCTTGTCACCGTGTCCT |
| | CGGCCTCCACTAAGGGCCCGTCAGTGTTCCCCCTTGCGCCATCCTCGAAGT |
| | CAACCTCCGGAGGAACTGCCGCACTGGGTTGCCTCGTGAAAGACTATTTCC |
| | CGGAACCCGTCACTGTCTCCTGGAACTCAGGAGCGCTCACCAGCGGAGTGC |
| | ATACCTTTCCTGCGGTGCTGCAGTCCAGCGGCCTGTACTCCCTGAGCTCCGT |
| | CGTGACCGTCCCCTCGTCGTCCCTGGGAACCCAAACCTACATTTGCAACGT |
| | CAATCACAAGCCAAGCAACACTAAGGTGGACAAGAGAGTGGAGCCCAAGT |
| | CCTGCGATAAGACCCACACCTGTCCTCCCTGTCCGGCACCTGAACTGCTTG |
| | GTGGACCTTCCGTGTTCCTGTTCCCGCCCAAGCCAAAAGACACCCTGATGA |
| | TCTCCCGCACTCCGGAAGTCACTTGCGTGGTCGTGGACGTGTCCCACGAGG |
| | ACCCCGAGGTCAAGTTTAATTGGTACGTGGACGGAGTGGAAGTGCACAAC |
| | GCCAAGACCAAGCCGCGGGAAGAACAGTACAACTCCACCTACCGCGTGGT |
| | GTCCGTCCTGACTGTGCTCCACCAGGACTGGCTGAACGGAAAGGAGTACA |
| | AGTGCAAAGTGTCCAACAAGGCACTGCCAGCCCCTATCGAAAAGACTATC |
| | TCCAAGGCCAAGGGCCAACCTAGGGAGCCCCAGGTGTACACGTTGCCTCCT |
| | TCCCGCGAAGAAATGACTAAGAACCAGGTGTCGCTGACCTGTCTCGTGAAA |
| | GGGTTCTACCCCTCTGACATCGCCGTGGAATGGGAGTCAAACGGACAGCCT |
| | GAGAACAACTATAAGACCACACCACCTGTCCTGGACTCCGACGGCTCCTTC |
| | TTCCTGTACTCAAAGTTGACCGTGGACAAGTCGCGGTGGCAACAGGGCAAC |
| | GTGTTCTCTTGCTCCGTGCTGCACGAAGCCCTGCACAGCCACTACACCCAA |
| | AAGTCGCTCAGCCTCTCCCCCGGAAAG (SEQ ID NO: 2618) |
| LCDR1 | RASQDISNYLA (SEQ ID NO: 2599) |
| (Combined) | |
| LCDR2 | RASSLQS (SEQ ID NO: 2600) |
| (Combined) | |
| LCDR3 | FQYRHMPSQT (SEQ ID NO: 2601) |
| (Combined) | |
| LCDR1 | RASQDISNYLA (SEQ ID NO: 2599) |
| (Kabat) | |
| LCDR2 | RASSLQS (SEQ ID NO: 2600) |
| (Kabat) | |
| LCDR3 | FQYRHMPSQT (SEQ ID NO: 2601) |
| (Kabat) | |
| LCDR1 | SQDISNY (SEQ ID NO: 2602) |
| (Chothia) | |
| LCDR2 | RAS (SEQ ID NO: 2603) |
| (Chothia) | |
| LCDR3 | YRHMPSQ (SEQ ID NO: 2604) |
| (Chothia) | |
| LCDR1 | QDISNY (SEQ ID NO: 2605) |
| (IMGT) | |
| LCDR2 | RAS (SEQ ID NO: 2603) |
| (IMGT) | |
| LCDR3 | FQYRHMPSQT (SEQ ID NO: 2601) |
| (IMGT) | |
| VL | DIQMTQSPSSLSASVGDRVTITCRASQDISNYLAWYQQKPGKAPKLLIYRASSL |
| | QSGVPSRFSGSGSGTDFTLTISSLQPEDFATYYCFQYRHMPSQTFGQGTKVEIK |
| | (SEQ ID NO: 2606) |
| DNA VL | GACATTCAGATGACCCAGTCCCCGTCGTCCCTGTCCGCATCCGTGGGCGAC |
| | AGAGTCACCATCACTTGCCGGGCCTCACAGGATATTTCCAACTACCTGGCC |
| | TGGTATCAGCAGAAGCCTGGAAAGGCCCCGAAGCTGCTGATCTACCGGGC |
| | GTCCTCCTTGCAATCGGGAGTGCCAAGCCGCTTTTCTGGTTCCGGGAGCGG |
| | GACTGACTTCACCCTGACTATTAGCAGCCTGCAGCCCGAAGATTTCGCTAC |
| | CTACTACTGCTTCCAGTACCGGCACATGCCCTCACAAACCTTCGGACAGGG |
| | CACCAAAGTCGAGATCAAG (SEQ ID NO: 2613) |
| Light Chain | DIQMTQSPSSLSASVGDRVTITCRASQDISNYLAWYQQKPGKAPKLLIYRASSL |
| | QSGVPSRFSGSGSGTDFTLTISSLQPEDFATYYCFQYRHMPSQTFGQGTKVEIK |
| | RTVAAPSVFIFPPSDEQLKSGTASVVCLLNNFYPREAKVQWKVDNALQSGNSQ |
| | ESVTEQDSKDSTYSLSSTLTLSKADYEKHKVYACEVTHQGLSSPVTKSFNRGE |
| | C (SEQ ID NO: 2608) |
| DNA Light | GACATTCAGATGACCCAGTCCCCGTCGTCCCTGTCCGCATCCGTGGGCGAC |
| Chain | AGAGTCACCATCACTTGCCGGGCCTCACAGGATATTTCCAACTACCTGGCC |
| | TGGTATCAGCAGAAGCCTGGAAAGGCCCCGAAGCTGCTGATCTACCGGGC |
| | GTCCTCCTTGCAATCGGGAGTGCCAAGCCGCTTTTCTGGTTCCGGGAGCGG |
| | GACTGACTTCACCCTGACTATTAGCAGCCTGCAGCCCGAAGATTTCGCTAC |
| | CTACTACTGCTTCCAGTACCGGCACATGCCCTCACAAACCTTCGGACAGGG |
| | CACCAAAGTCGAGATCAAGCGTACGGTGGCCGCTCCCAGCGTGTTCATCTT |
| | CCCCCCCAGCGACGAGCAGCTGAAGAGCGGCACCGCCAGCGTGGTGTGCC |
| | TGCTGAACAACTTCTACCCCCGGGAGGCCAAGGTGCAGTGGAAGGTGGAC |
| | AACGCCCTGCAGAGCGGCAACAGCCAGGAGAGCGTCACCGAGCAGGACA |
| | GCAAGGACTCCACCTACAGCCTGAGCAGCACCCTGACCCTGAGCAAGGCC |
| | GACTACGAGAAGCATAAGGTGTACGCCTGCGAGGTGACCCACCAGGGCCT |
| | GTCCAGCCCCGTGACCAAGAGCTTCAACAGGGGCGAGTGC (SEQ ID NO: 2614) |

MOR44698E

| | |
|---|---|
| HCDR1 | GYTFTGYHMS (SEQ ID NO: 2586) |
| (Combined) | |
| HCDR2 | VINPVSGNTVYAQKFQG (SEQ ID NO: 2587) |
| (Combined) | |
| HCDR3 | IPSYTYAFDY (SEQ ID NO: 2588) |
| (Combined) | |
| HCDR1 | GYHMS (SEQ ID NO: 2589) |
| (Kabat) | |
| HCDR2 | VINPVSGNTVYAQKFQG (SEQ ID NO: 2587) |
| (Kabat) | |
| HCDR3 | IPSYTYAFDY (SEQ ID NO: 2588) |
| (Kabat) | |
| HCDR1 | GYTFTGY (SEQ ID NO: 2590) |
| (Chothia) | |
| HCDR2 | NPVSGN (SEQ ID NO: 2591) |
| (Chothia) | |
| HCDR3 | IPSYTYAFDY (SEQ ID NO: 2588) |
| (Chothia) | |
| HCDR1 | GYTFTGYH (SEQ ID NO: 2592) |
| (IMGT) | |
| HCDR2 | INPVSGNT (SEQ ID NO: 2593) |
| (IMGT) | |
| HCDR3 | ARIPSYTYAFDY (SEQ ID NO: 2594) |
| (IMGT) | |
| VH | QVQLVQSGAEVKKPGASVKVSCKASGYTFTGYHMSWVRQAPGQGLEWMGV |
| | INPVSGNTVYAQKFQGRVTMTRDTSISTAYMELSRLRSEDTAVYYCARIPSYT |
| | YAFDYWGQGTLVTVSS (SEQ ID NO: 2595) |
| DNA VH | CAAGTGCAACTCGTGCAGTCAGGAGCCGAAGTCAAGAAGCCTGGAGCCTC |
| | GGTCAAGGTGTCCTGCAAGGCCAGCGGATACACTTTCACTGGATACCACAT |
| | GTCGTGGGTCAGACAGGCTCCTGGCCAAGGGCTGGAGTGGATGGGCGTCA |
| | TCAACCCGGTGTCGGGTAATACCGTGTACGCCCAGAAGTTCCAGGGTCGCG |
| | TGACCATGACCCGGGATACCTCCATTAGCACCGCGTACATGGAGCTCAGCC |
| | GGTTGAGATCCGAGGATACCGCCGTGTACTACTGTGCGCGGATCCCGTCCT |
| | ACACTTACGCCTTCGACTATTGGGGCCAGGGGACTCTTGTCACCGTGTCCT |
| | CG (SEQ ID NO: 2610) |
| Heavy Chain | QVQLVQSGAEVKKPGASVKVSCKASGYTFTGYHMSWVRQAPGQGLEWMGV |
| | INPVSGNTVYAQKFQGRVTMTRDTSISTAYMELSRLRSEDTAVYYCARIPSYT |
| | YAFDYWGQGTLVTVSSASTKGPSVFPLAPSSKSTSGGTAALGCLVKDYFPEPV |
| | TVSWNSGALTSGVHTFPAVLQSSGLYSLSSVVTVPSSSLGTQTYICNVNHKPSN |
| | TKVDKRVEPKSCDKTHTCPPCPAPELLGGPSVFLFPPKPKDTLMISRTPEVTCV |
| | VVAVSHEDPEVKFNWYVDGVEVHNAKTKPREEQYNSTYRVVSVLTVLHQD |
| | WLNGKEYKCKVSNKALAAPIEKTISKAKGQPREPQVYTLPPSREEMTKNQVSL |
| | TCLVKGFYPSDIAVEWESNGQPENNYKTTPPVLDSDGSFFLYSKLTVDKSRWQ |
| | QGNVFSCSVLHEALHSHYTQKSLSLSPGK (SEQ ID NO: 2619) |
| DNA Heavy | CAAGTGCAACTCGTGCAGTCAGGAGCCGAAGTCAAGAAGCCTGGAGCCTC |
| Chain | GGTCAAGGTGTCCTGCAAGGCCAGCGGATACACTTTCACTGGATACCACAT |
| | GTCGTGGGTCAGACAGGCTCCTGGCCAAGGGCTGGAGTGGATGGGCGTCA |
| | TCAACCCGGTGTCGGGTAATACCGTGTACGCCCAGAAGTTCCAGGGTCGCG |
| | TGACCATGACCCGGGATACCTCCATTAGCACCGCGTACATGGAGCTCAGCC |
| | GGTTGAGATCCGAGGATACCGCCGTGTACTACTGTGCGCGGATCCCGTCCT |
| | ACACTTACGCCTTCGACTATTGGGGCCAGGGGACTCTTGTCACCGTGTCCT |
| | CGGCCTCCACTAAGGGCCCGTCAGTGTTCCCCCTTGCGCCATCCTCGAAGT |
| | CAACCTCCGGAGGAACTGCCGCACTGGGTTGCCTCGTGAAAGACTATTTCC |
| | CGGAACCCGTCACTGTCTCCTGGAACTCAGGAGCGCTCACCAGCGGAGTGC |
| | ATACCTTTCCTGCGGTGCTGCAGTCCAGCGGCCTGTACTCCCTGAGCTCCGT |
| | CGTGACCGTCCCCTCGTCGTCCCTGGGAACCCAAACCTACATTTGCAACGT |
| | CAATCACAAGCCAAGCAACACTAAGGTGGACAAGAGAGTGGAGCCCAAGT |
| | CCTGCGATAAGACCCACACCTGTCCTCCCTGTCCGGCACCTGAACTGCTTG |
| | GTGGACCTTCCGTGTTCCTGTTCCCGCCCAAGCCAAAAGACACCCTGATGA |
| | TCTCCCGCACTCCGGAAGTCACTTGCGTGGTCGTGGCCGTGTCCCACGAGG |
| | ACCCCGAGGTCAAGTTTAATTGGTACGTGGACGGAGTGGAAGTGCACAAC |
| | GCCAAGACCAAGCCGCGGGAAGAACAGTACAACTCCACCTACCGCGTGGT |
| | GTCCGTCCTGACTGTGCTCCACCAGGACTGGCTGAACGGAAAGGAGTACA |
| | AGTGCAAAGTGTCCAACAAGGCACTGGCTGCCCCTATCGAAAAGACTATCT |
| | CCAAGGCCAAGGGCCAACCTAGGGAGCCCCAGGTGTACACGTTGCCTCCTT |
| | CCCGCGAAGAAATGACTAAGAACCAGGTGTCGCTGACCTGTCTCGTGAAA |
| | GGGTTCTACCCCTCTGACATCGCCGTGGAATGGGAGTCAAACGGACAGCCT |
| | GAGAACAACTATAAGACCACACCACCTGTCCTGGACTCCGACGGCTCCTTC |
| | TTCCTGTACTCAAAGTTGACCGTGGACAAGTCGCGGTGGCAACAGGGCAAC |
| | GTGTTCTCTTGCTCCGTGCTGCACGAAGCCCTGCACAGCCACTACACCCAA |
| | AAGTCGCTCAGCCTCTCCCCCGGAAAG (SEQ ID NO: 2620) |
| LCDR1 | RASQDISNYLA (SEQ ID NO: 2599) |
| (Combined) | |
| LCDR2 | RASSLQS (SEQ ID NO: 2600) |
| (Combined) | |
| LCDR3 | FQYRHMPSQT (SEQ ID NO: 2601) |
| (Combined) | |
| LCDR1 | RASQDISNYLA (SEQ ID NO: 2599) |
| (Kabat) | |
| LCDR2 | RASSLQS (SEQ ID NO: 2600) |
| (Kabat) | |
| LCDR3 | FQYRHMPSQT (SEQ ID NO: 2601) |
| (Kabat) | |
| LCDR1 | SQDISNY (SEQ ID NO: 2602) |
| (Chothia) | |
| LCDR2 | RAS (SEQ ID NO: 2603) |
| (Chothia) | |
| LCDR3 | YRHMPSQ (SEQ ID NO: 2604) |
| (Chothia) | |
| LCDR1 | QDISNY (SEQ ID NO: 2605) |
| (IMGT) | |
| LCDR2 | RAS (SEQ ID NO: 2603) |
| (IMGT) | |
| LCDR3 | FQYRHMPSQT (SEQ ID NO: 2601) |
| (IMGT) | |
| VL | DIQMTQSPSSLSASVGDRVTITCRASQDISNYLAWYQQKPGKAPKLLIYRASSL |
| | QSGVPSRFSGSGSGTDFTLTISSLQPEDFATYYCFQYRHMPSQTFGQGTKVEIK |
| | (SEQ ID NO: 2606) |
| DNA VL | GACATTCAGATGACCCAGTCCCCGTCGTCCCTGTCCGCATCCGTGGGCGAC |
| | AGAGTCACCATCACTTGCCGGGCCTCACAGGATATTTCCAACTACCTGGCC |
| | TGGTATCAGCAGAAGCCTGGAAAGGCCCCGAAGCTGCTGATCTACCGGGC |
| | GTCCTCCTTGCAATCGGGAGTGCCAAGCCGCTTTTCTGGTTCCGGGAGCGG |
| | GACTGACTTCACCCTGACTATTAGCAGCCTGCAGCCCGAAGATTTCGCTAC |
| | CTACTACTGCTTCCAGTACCGGCACATGCCCTCACAAACCTTCGGACAGGG |
| | CACCAAAGTCGAGATCAAG (SEQ ID NO: 2613) |
| Light Chain | DIQMTQSPSSLSASVGDRVTITCRASQDISNYLAWYQQKPGKAPKLLIYRASSL |
| | QSGVPSRFSGSGSGTDFTLTISSLQPEDFATYYCFQYRHMPSQTFGQGTKVEIK |
| | RTVAAPSVFIFPP SDEQLKSGTASVVCLLNNFYPREAKVQWKVDNALQSGNSQ |
| | ESVTEQDSKDSTYSLSSTLTLSKADYEKHKVYACEVTHQGLSSPVTKSFNRGE |
| | C (SEQ ID NO: 2608) |
| DNA Light | GACATTCAGATGACCCAGTCCCCGTCGTCCCTGTCCGCATCCGTGGGCGAC |
| Chain | AGAGTCACCATCACTTGCCGGGCCTCACAGGATATTTCCAACTACCTGGCC |
| | TGGTATCAGCAGAAGCCTGGAAAGGCCCCGAAGCTGCTGATCTACCGGGC |
| | GTCCTCCTTGCAATCGGGAGTGCCAAGCCGCTTTTCTGGTTCCGGGAGCGG |
| | GACTGACTTCACCCTGACTATTAGCAGCCTGCAGCCCGAAGATTTCGCTAC |
| | CTACTACTGCTTCCAGTACCGGCACATGCCCTCACAAACCTTCGGACAGGG |
| | CACCAAAGTCGAGATCAAGCGTACGGTGGCCGCTCCCAGCGTGTTCATCTT |
| | CCCCCCCAGCGACGAGCAGCTGAAGAGCGGCACCGCCAGCGTGGTGTGCC |
| | TGCTGAACAACTTCTACCCCCGGGAGGCCAAGGTGCAGTGGAAGGTGGAC |
| | AACGCCCTGCAGAGCGGCAACAGCCAGGAGAGCGTCACCGAGCAGGACA |
| | GCAAGGACTCCACCTACAGCCTGAGCAGCACCCTGACCCTGAGCAAGGCC |
| | GACTACGAGAAGCATAAGGTGTACGCCTGCGAGGTGACCCACCAGGGCCT |
| | GTCCAGCCCCGTGACCAAGAGCTTCAACAGGGGCGAGTGC (SEQ ID NO: 2614) |

MOR44698F

| | |
|---|---|
| HCDR1 | GYTFTGYHMS (SEQ ID NO: 2586) |
| (Combined) | |
| HCDR2 | VINPVSGNTVYAQKFQG (SEQ ID NO: 2587) |
| (Combined) | |
| HCDR3 | IPSYTYAFDY (SEQ ID NO: 2588) |
| (Combined) | |
| HCDR1 | GYHMS (SEQ ID NO: 2589) |
| (Kabat) | |
| HCDR2 | VINPVSGNTVYAQKFQG (SEQ ID NO: 2587) |
| (Kabat) | |
| HCDR3 | IPSYTYAFDY (SEQ ID NO: 2588) |
| (Kabat) | |
| HCDR1 | GYTFTGY (SEQ ID NO: 2590) |
| (Chothia) | |
| HCDR2 | NPVSGN (SEQ ID NO: 2591) |
| (Chothia) | |
| HCDR3 | IPSYTYAFDY (SEQ ID NO: 2588) |
| (Chothia) | |
| HCDR1 | GYTFTGYH (SEQ ID NO: 2592) |
| (IMGT) | |
| HCDR2 | INPVSGNT (SEQ ID NO: 2593) |
| (IMGT) | |
| HCDR3 | ARIPSYTYAFDY (SEQ ID NO: 2594) |
| (IMGT) | |
| VH | QVQLVQSGAEVKKPGASVKVSCKASGYTFTGYHMSWVRQAPGQGLEWMGV |
| | INPVSGNTVYAQKFQGRVTMTRDTSISTAYMELSRLRSEDTAVYYCARIPSYT |
| | YAFDYWGQGTLVTVSS (SEQ ID NO: 2595) |
| DNA VH | CAAGTGCAACTCGTGCAGTCAGGAGCCGAAGTCAAGAAGCCTGGAGCCTC |
| | GGTCAAGGTGTCCTGCAAGGCCAGCGGATACACTTTCACTGGATACCACAT |
| | GTCGTGGGTCAGACAGGCTCCTGGCCAAGGGCTGGAGTGGATGGGCGTCA |
| | TCAACCCGGTGTCGGGTAATACCGTGTACGCCCAGAAGTTCCAGGGTCGCG |
| | TGACCATGACCCGGGATACCTCCATTAGCACCGCGTACATGGAGCTCAGCC |
| | GGTTGAGATCCGAGGATACCGCCGTGTACTACTGTGCGCGGATCCCGTCCT |
| | ACACTTACGCCTTCGACTATTGGGGCCAGGGGACTCTTGTCACCGTGTCCT |
| | CG (SEQ ID NO: 2610) |
| Heavy Chain | QVQLVQSGAEVKKPGASVKVSCKASGYTFTGYHMSWVRQAPGQGLEWMGV |
| | INPVSGNTVYAQKFQGRVTMTRDTSISTAYMELSRLRSEDTAVYYCARIPSYT |
| | YAFDYWGQGTLVTVSSASTKGPSVFPLAPSSKSTSGGTAALGCLVKDYFPEPV |
| | TVSWNSGALTSGVHTFPAVLQSSGLYSLSSVVTVPSSSLGTQTYICNVNHKPSN |
| | TKVDKRVEPKSCDKTHTCPPCPAPELLGGPSVFLFPPKPKDTLYITREPEVTCV |
| | VVDVSHEDPEVKFNWYVDGVEVHNAKTKPREEQYNSTYRVVSVLTVLHQD |
| | WLNGKEYKCKVSNKALPAPIEKTISKAKGQPREPQVYTLPPSREEMTKNQVSL |
| | TCLVKGFYPSDIAVEWESNGQPENNYKTTPPVLDSDGSFFLYSKLTVDKSRWQ |
| | QGNVFSCSVMHEALHNHYTQKSLSLSPGK (SEQ ID NO: 2621) |
| DNA Heavy | CAAGTGCAACTCGTGCAGTCAGGAGCCGAAGTCAAGAAGCCTGGAGCCTC |
| Chain | GGTCAAGGTGTCCTGCAAGGCCAGCGGATACACTTTCACTGGATACCACAT |
| | GTCGTGGGTCAGACAGGCTCCTGGCCAAGGGCTGGAGTGGATGGGCGTCA |
| | TCAACCCGGTGTCGGGTAATACCGTGTACGCCCAGAAGTTCCAGGGTCGCG |
| | TGACCATGACCCGGGATACCTCCATTAGCACCGCGTACATGGAGCTCAGCC |
| | GGTTGAGATCCGAGGATACCGCCGTGTACTACTGTGCGCGGATCCCGTCCT |
| | ACACTTACGCCTTCGACTATTGGGGCCAGGGGACTCTTGTCACCGTGTCCT |
| | CGGCCTCCACTAAGGGCCCGTCAGTGTTCCCCCTTGCGCCATCCTCGAAGT |
| | CAACCTCCGGAGGAACTGCCGCACTGGGTTGCCTCGTGAAAGACTATTTCC |
| | CGGAACCCGTCACTGTCTCCTGGAACTCAGGAGCGCTCACCAGCGGAGTGC |
| | ATACCTTTCCTGCGGTGCTGCAGTCCAGCGGCCTGTACTCCCTGAGCTCCGT |
| | CGTGACCGTCCCCTCGTCGTCCCTGGGAACCCAAACCTACATTTGCAACGT |
| | CAATCACAAGCCAAGCAACACTAAGGTGGACAAGAGAGTGGAGCCCAAGT |
| | CCTGCGATAAGACCCACACCTGTCCTCCCTGTCCGGCACCTGAACTGCTTG |
| | GTGGACCTTCCGTGTTCCTGTTCCCGCCCAAGCCAAAAGACACCCTGTATA |
| | TCACTCGCGAACCGGAAGTCACTTGCGTGGTCGTGGACGTGTCCCACGAGG |
| | ACCCCGAGGTCAAGTTTAATTGGTACGTGGACGGAGTGGAAGTGCACAAC |
| | GCCAAGACCAAGCCGCGGGAAGAACAGTACAACTCCACCTACCGCGTGGT |
| | GTCCGTCCTGACTGTGCTCCACCAGGACTGGCTGAACGGAAAGGAGTACA |
| | AGTGCAAAGTGTCCAACAAGGCACTGCCAGCCCCTATCGAAAAGACTATC |
| | TCCAAGGCCAAGGGCCAACCTAGGGAGCCCCAGGTGTACACGTTGCCTCCT |
| | TCCCGCGAAGAAATGACTAAGAACCAGGTGTCGCTGACCTGTCTCGTGAAA |
| | GGGTTCTACCCCTCTGACATCGCCGTGGAATGGGAGTCAAACGGACAGCCT |
| | GAGAACAACTATAAGACCACACCACCTGTCCTGGACTCCGACGGCTCCTTC |
| | TTCCTGTACTCAAAGTTGACCGTGGACAAGTCGCGGTGGCAACAGGGCAAC |
| | GTGTTCTCTTGCTCCGTGATGCACGAAGCCCTGCACAACCACTACACCCAA |
| | AAGTCGCTCAGCCTCTCCCCCGGAAAG (SEQ ID NO: 2622) |
| LCDR1 | RASQDISNYLA (SEQ ID NO: 2599) |
| (Combined) | |
| LCDR2 | RASSLQS (SEQ ID NO: 2600) |
| (Combined) | |
| LCDR3 | FQYRHMPSQT (SEQ ID NO: 2601) |
| (Combined) | |
| LCDR1 | RASQDISNYLA (SEQ ID NO: 2599) |
| (Kabat) | |
| LCDR2 | RASSLQS (SEQ ID NO: 2600) |
| (Kabat) | |
| LCDR3 | FQYRHMPSQT (SEQ ID NO: 2601) |
| (Kabat) | |
| LCDR1 | SQDISNY (SEQ ID NO: 2602) |
| (Chothia) | |
| LCDR2 | RAS (SEQ ID NO: 2603) |
| (Chothia) | |
| LCDR3 | YRHMPSQ (SEQ ID NO: 2604) |
| (Chothia) | |
| LCDR1 | QDISNY (SEQ ID NO: 2605) |
| (IMGT) | |
| LCDR2 | RAS (SEQ ID NO: 2603) |
| (IMGT) | |
| LCDR3 | FQYRHMPSQT (SEQ ID NO: 2601) |
| (IMGT) | |
| VL | DIQMTQSPSSLSASVGDRVTITCRASQDISNYLAWYQQKPGKAPKLLIYRASSL |
| | QSGVPSRFSGSGSGTDFTLTISSLQPEDFATYYCFQYRHMPSQTFGQGTKVEIK |
| | (SEQ ID NO: 2606) |
| DNA VL | GACATTCAGATGACCCAGTCCCCGTCGTCCCTGTCCGCATCCGTGGGCGAC |
| | AGAGTCACCATCACTTGCCGGGCCTCACAGGATATTTCCAACTACCTGGCC |
| | TGGTATCAGCAGAAGCCTGGAAAGGCCCCGAAGCTGCTGATCTACCGGGC |
| | GTCCTCCTTGCAATCGGGAGTGCCAAGCCGCTTTTCTGGTTCCGGGAGCGG |
| | GACTGACTTCACCCTGACTATTAGCAGCCTGCAGCCCGAAGATTTCGCTAC |
| | CTACTACTGCTTCCAGTACCGGCACATGCCCTCACAAACCTTCGGACAGGG |
| | CACCAAAGTCGAGATCAAG (SEQ ID NO: 2613) |
| Light Chain | DIQMTQSPSSLSASVGDRVTITCRASQDISNYLAWYQQKPGKAPKLLIYRASSL |
| | QSGVPSRFSGSGSGTDFTLTISSLQPEDFATYYCFQYRHMPSQTFGQGTKVEIK |
| | RTVAAPSVFIFPPSDEQLKSGTASVVCLLNNFYPREAKVQWKVDNALQSGNSQ |
| | ESVTEQDSKDSTYSLSSTLTLSKADYEKHKVYACEVTHQGLSSPVTKSFNRGE |
| | C (SEQ ID NO: 2608) |
| DNA Light | GACATTCAGATGACCCAGTCCCCGTCGTCCCTGTCCGCATCCGTGGGCGAC |
| Chain | AGAGTCACCATCACTTGCCGGGCCTCACAGGATATTTCCAACTACCTGGCC |
| | TGGTATCAGCAGAAGCCTGGAAAGGCCCCGAAGCTGCTGATCTACCGGGC |
| | GTCCTCCTTGCAATCGGGAGTGCCAAGCCGCTTTTCTGGTTCCGGGAGCGG |
| | GACTGACTTCACCCTGACTATTAGCAGCCTGCAGCCCGAAGATTTCGCTAC |
| | CTACTACTGCTTCCAGTACCGGCACATGCCCTCACAAACCTTCGGACAGGG |
| | CACCAAAGTCGAGATCAAGCGTACGGTGGCCGCTCCCAGCGTGTTCATCTT |
| | CCCCCCCAGCGACGAGCAGCTGAAGAGCGGCACCGCCAGCGTGGTGTGCC |
| | TGCTGAACAACTTCTACCCCCGGGAGGCCAAGGTGCAGTGGAAGGTGGAC |
| | AACGCCCTGCAGAGCGGCAACAGCCAGGAGAGCGTCACCGAGCAGGACA |
| | GCAAGGACTCCACCTACAGCCTGAGCAGCACCCTGACCCTGAGCAAGGCC |
| | GACTACGAGAAGCATAAGGTGTACGCCTGCGAGGTGACCCACCAGGGCCT |
| | GTCCAGCCCCGTGACCAAGAGCTTCAACAGGGGCGAGTGC (SEQ ID NO: 2614) |

MOR44746A

| | |
|---|---|
| HCDR1 | GDSVSSSSAAWN (SEQ ID NO: 2623) |
| (Combined) | |
| HCDR2 | HIGYRSKWYNEYAVSVKS (SEQ ID NO: 2624) |
| (Combined) | |
| HCDR3 | GMYGSVPYKEGYYFDI (SEQ ID NO: 2625) |
| (Combined) | |
| HCDR1 | SSSAAWN (SEQ ID NO: 2626) |
| (Kabat) | |
| HCDR2 | HIGYRSKWYNEYAVSVKS (SEQ ID NO: 2624) |
| (Kabat) | |
| HCDR3 | GMYGSVPYKEGYYFDI (SEQ ID NO: 2625) |
| (Kabat) | |
| HCDR1 | GDSVSSSSA (SEQ ID NO: 2627) |
| (Chothia) | |
| HCDR2 | GYRSKWY (SEQ ID NO: 2628) |
| (Chothia) | |
| HCDR3 | GMYGSVPYKEGYYFDI (SEQ ID NO: 2625) |
| (Chothia) | |
| HCDR1 | GDSVSSSSAA (SEQ ID NO: 2629) |
| (IMGT) | |
| HCDR2 | IGYRSKWYN (SEQ ID NO: 2630) |
| (IMGT) | |
| HCDR3 | ARGMYGSVPYKEGYYFDI (SEQ ID NO: 2631) |
| (IMGT) | |
| VH | QVQLQQSGPGLVKPSQTLSLTCAISGDSVSSSSAAWNWIRQSPSRGLEWLGHI |
| | GYRSKWYNEYAVSVKSRITINPDTSKNQFSLQLNSVTPEDTAVYYCARGMYG |
| | SVPYKEGYYFDIWGQGTLVTVSS (SEQ ID NO: 2632) |
| DNA VH | CAGGTGCAATTGCAGCAGAGCGGTCCGGGCCTGGTGAAACCGAGCCAGAC |
| | CCTGAGCCTGACCTGCGCGATTTCCGGAGATAGCGTGAGCTCTTCTTCTGCT |
| | GCTTGGAACTGGATTCGTCAGAGCCCGAGCCGTGGCCTCGAGTGGCTGGGC |
| | CATATCGGTTACCGTAGCAAATGGTACAACGAATATGCCGTGAGCGTGAA |
| | AAGCCGCATTACCATTAACCCGGATACTTCGAAAAACCAGTTTAGCCTGCA |
| | ACTGAACAGCGTGACCCCGGAAGATACGGCCGTGTATTATTGCGCGCGTGG |
| | TATGTACGGTTCTGTTCCCTACAAAGAAGGTTACTACTTCGATATTTGGGGC |
| | CAAGGCACCCTGGTGACTGTTAGCTCA (SEQ ID NO: 2633) |
| Heavy Chain | QVQLQQSGPGLVKPSQTLSLTCAISGDSVSSSSAAWNWIRQSPSRGLEWLGHI |
| | GYRSKWYNEYAVSVKSRITINPDTSKNQFSLQLNSVTPEDTAVYYCARGMYG |
| | SVPYKEGYYFDIWGQGTLVTVSSASTKGPSVFPLAPSSKSTSGGTAALGCLVK |
| | DYFPEPVTVSWNSGALTSGVHTFPAVLQSSGLYSLSSVVTVPSSSLGTQTYICN |
| | VNHKPSNTKVDKRVEPKSCDKTHTCPPCPAPEAAGGPSVFLFPPKPKDTLMISR |
| | TPEVTCVVVDVSHEDPEVKFNWYVDGVEVHNAKTKPREEQYNSTYRVVSVL |
| | TVLHQDWLNGKEYKCKVSNKALPAPIEKTISKAKGQPREPQVYTLPPSREEMT |
| | KNQVSLTCLVKGFYPSDIAVEWESNGQPENNYKTTPPVLDSDGSFFLYSKLTV |
| | DKSRWQQGNVFSCSVMHEALHNHYTQKSLSLSPGK (SEQ ID NO: 2634) |
| DNA Heavy | CAGGTGCAATTGCAGCAGAGCGGTCCGGGCCTGGTGAAACCGAGCCAGAC |
| Chain | CCTGAGCCTGACCTGCGCGATTTCCGGAGATAGCGTGAGCTCTTCTTCTGCT |
| | GCTTGGAACTGGATTCGTCAGAGCCCGAGCCGTGGCCTCGAGTGGCTGGGC |
| | CATATCGGTTACCGTAGCAAATGGTACAACGAATATGCCGTGAGCGTGAA |
| | AAGCCGCATTACCATTAACCCGGATACTTCGAAAAACCAGTTTAGCCTGCA |
| | ACTGAACAGCGTGACCCCGGAAGATACGGCCGTGTATTATTGCGCGCGTGG |
| | TATGTACGGTTCTGTTCCCTACAAAGAAGGTTACTACTTCGATATTTGGGGC |
| | CAAGGCACCCTGGTGACTGTTAGCTCAGCCTCCACCAAGGGTCCATCGGTC |
| | TTCCCCCTGGCACCCTCCTCCAAGAGCACCTCTGGGGGCACAGCGGCCCTG |
| | GGCTGCCTGGTCAAGGACTACTTCCCCGAACCGGTGACGGTGTCGTGGAAC |
| | TCAGGCGCCCTGACCAGCGGCGTGCACACCTTCCCGGCTGTCCTACAGTCC |
| | TCAGGACTCTACTCCCTCAGCAGCGTGGTGACCGTGCCCTCCAGCAGCTTG |
| | GGCACCCAGACCTACATCTGCAACGTGAATCACAAGCCCAGCAACACCAA |
| | GGTGGACAAGAGAGTTGAGCCCAAATCTTGTGACAAAACTCACACATGCC |
| | CACCGTGCCCAGCACCTGAAGCAGCGGGGGGACCGTCAGTCTTCCTCTTCC |
| | CCCCAAAACCCAAGGACACCCTCATGATCTCCCGGACCCCTGAGGTCACAT |
| | GCGTGGTGGTGGACGTGAGCCACGAAGACCCTGAGGTCAAGTTCAACTGG |
| | TACGTGGACGGCGTGGAGGTGCATAATGCCAAGACAAAGCCGCGGGAGGA |
| | GCAGTACAACAGCACGTACCGGGTGGTCAGCGTCCTCACCGTCCTGCACCA |
| | GGACTGGCTGAATGGCAAGGAGTACAAGTGCAAGGTCTCCAACAAAGCCC |
| | TCCCAGCCCCCATCGAGAAAACCATCTCCAAAGCCAAAGGGCAGCCCCGA |
| | GAACCACAGGTGTACACCCTGCCCCCATCCCGGGAGGAGATGACCAAGAA |
| | CCAGGTCAGCCTGACCTGCCTGGTCAAAGGCTTCTATCCCAGCGACATCGC |
| | CGTGGAGTGGGAGAGCAATGGGCAGCCGGAGAACAACTACAAGACCACG |
| | CCTCCCGTGCTGGACTCCGACGGCTCCTTCTTCCTCTACAGCAAGCTCACCG |
| | TGGACAAGAGCAGGTGGCAGCAGGGGAACGTCTTCTCATGCTCCGTGATG |
| | CATGAGGCTCTGCACAACCACTACACGCAGAAGAGCCTCTCCCTGTCTCCG |
| | GGTAAA (SEQ ID NO: 2635) |
| LCDR1 | RASQGISSDLN (SEQ ID NO: 2636) |
| (Combined) | |
| LCDR2 | AASNLQS (SEQ ID NO: 2637) |
| (Combined) | |
| LCDR3 | QQYTDESMT (SEQ ID NO: 2638) |
| (Combined) | |
| LCDR1 | RASQGISSDLN (SEQ ID NO: 2636) |
| (Kabat) | |
| LCDR2 | AASNLQS (SEQ ID NO: 2637) |
| (Kabat) | |
| LCDR3 | QQYTDESMT (SEQ ID NO: 2638) |
| (Kabat) | |
| LCDR1 | SQGISSD (SEQ ID NO: 2639) |
| (Chothia) | |
| LCDR2 | AAS (SEQ ID NO: 2640) |
| (Chothia) | |
| LCDR3 | YTDESM (SEQ ID NO: 2641) |
| (Chothia) | |
| LCDR1 | QGISSD (SEQ ID NO: 2642) |
| (IMGT) | |
| LCDR2 | AAS (SEQ ID NO: 2640) |
| (IMGT) | |
| LCDR3 | QQYTDESMT (SEQ ID NO: 2638) |
| (IMGT) | |
| VL | DIQMTQSPSSLSASVGDRVTITCRASQGISSDLNWYQQKPGKAPKLLIYAASNL |
| | QSGVPSRFSGSGSGTDFTLTISSLQPEDFATYYCQQYTDESMTFGQGTKVEIK |
| | (SEQ ID NO: 2643) |
| DNA VL | GATATCCAGATGACCCAGAGCCCGAGCAGCCTGAGCGCCAGCGTGGGCGA |
| | TCGCGTGACCATTACCTGCAGAGCCAGCCAGGGTATTTCTTCTGACCTGAA |
| | CTGGTACCAGCAGAAACCGGGCAAAGCGCCGAAACTATTAATCTACGCTG |
| | CTTCTAACCTGCAAAGCGGCGTGCCGAGCCGCTTTAGCGGCAGCGGATCCG |
| | GCACCGATTTCACCCTGACCATTAGCTCTCTGCAACCGGAAGACTTTGCGA |
| | CCTATTATTGCCAGCAGTACACTGACGAATCTATGACCTTTGGCCAGGGCA |
| | CGAAAGTTGAAATTAAA (SEQ ID NO: 2644) |
| Light Chain | DIQMTQSPSSLSASVGDRVTITCRASQGISSDLNWYQQKPGKAPKLLIYAASNL |
| | QSGVPSRFSGSGSGTDFTLTISSLQPEDFATYYCQQYTDESMTFGQGTKVEIKR |
| | TVAAPSVFIFPPSDEQLKSGTASVVCLLNNFYPREAKVQWKVDNALQSGNSQE |
| | SVTEQDSKDSTYSLSSTLTLSKADYEKHKVYACEVTHQGLSSPVTKSFNRGEC |
| | (SEQ ID NO: 2645) |
| DNA Light | GATATCCAGATGACCCAGAGCCCGAGCAGCCTGAGCGCCAGCGTGGGCGA |
| Chain | TCGCGTGACCATTACCTGCAGAGCCAGCCAGGGTATTTCTTCTGACCTGAA |
| | CTGGTACCAGCAGAAACCGGGCAAAGCGCCGAAACTATTAATCTACGCTG |
| | CTTCTAACCTGCAAAGCGGCGTGCCGAGCCGCTTTAGCGGCAGCGGATCCG |
| | GCACCGATTTCACCCTGACCATTAGCTCTCTGCAACCGGAAGACTTTGCGA |
| | CCTATTATTGCCAGCAGTACACTGACGAATCTATGACCTTTGGCCAGGGCA |
| | CGAAAGTTGAAATTAAACGTACGGTGGCCGCTCCCAGCGTGTTCATCTTCC |
| | CCCCCAGCGACGAGCAGCTGAAGAGCGGCACCGCCAGCGTGGTGTGCCTG |
| | CTGAACAACTTCTACCCCCGGGAGGCCAAGGTGCAGTGGAAGGTGGACAA |
| | CGCCCTGCAGAGCGGCAACAGCCAGGAAAGCGTCACCGAGCAGGACAGCA |
| | AGGACTCCACCTACAGCCTGAGCAGCACCCTGACCCTGAGCAAGGCCGAC |
| | TACGAGAAGCACAAGGTGTACGCCTGCGAGGTGACCCACCAGGGCCTGTC |
| | CAGCCCCGTGACCAAGAGCTTCAACCGGGGCGAGTGT (SEQ ID NO: 2646) |

MOR44746B

| | |
|---|---|
| HCDR1 | GDSVSSSSAAWN (SEQ ID NO: 2623) |
| (Combined) | |
| HCDR2 | HIGYRSKWYNEYAVSVKS (SEQ ID NO: 2624) |
| (Combined) | |
| HCDR3 | GMYGSVPYKEGYYFDI (SEQ ID NO: 2625) |
| (Combined) | |
| HCDR1 | SSSAAWN (SEQ ID NO: 2626) |
| (Kabat) | |
| HCDR2 | HIGYRSKWYNEYAVSVKS (SEQ ID NO: 2624) |
| (Kabat) | |
| HCDR3 | GMYGSVPYKEGYYFDI (SEQ ID NO: 2625) |
| (Kabat) | |
| HCDR1 | GDSVSSSSA (SEQ ID NO: 2627) |
| (Chothia) | |
| HCDR2 | GYRSKWY (SEQ ID NO: 2628) |
| (Chothia) | |
| HCDR3 | GMYGSVPYKEGYYFDI (SEQ ID NO: 2625) |
| (Chothia) | |
| HCDR1 | GDSVSSSSAA (SEQ ID NO: 2629) |
| (IMGT) | |
| HCDR2 | IGYRSKWYN (SEQ ID NO: 2630) |
| (IMGT) | |
| HCDR3 | ARGMYGSVPYKEGYYFDI (SEQ ID NO: 2631) |
| (IMGT) | |
| VH | QVQLQQSGPGLVKPSQTLSLTCAISGDSVSSSSAAWNWIRQSPSRGLEWLGHI |
| | GYRSKWYNEYAVSVKSRITINPDTSKNQFSLQLNSVTPEDTAVYYCARGMYG |
| | SVPYKEGYYFDIWGQGTLVTVSS (SEQ ID NO: 2632) |
| DNA VH | CAAGTGCAACTCCAGCAGTCAGGACCGGGGTTGGTCAAGCCTTCGCAGAC |
| | CCTGTCCCTCACTTGCGCCATTAGCGGAGATTCGGTGTCGTCGTCGTCAGC |
| | CGCCTGGAACTGGATTAGACAGTCCCCTTCCCGAGGGCTGGAGTGGCTGGG |
| | CCACATCGGATACCGCAGCAAGTGGTACAACGAATACGCCGTCAGCGTGA |
| | AGTCACGCATCACCATCAACCCGGATACTAGCAAGAACCAGTTCAGCCTCC |
| | AGTTGAACTCCGTGACCCCGGAGGATACCGCCGTGTACTACTGTGCGCGGG |
| | GCATGTACGGATCCGTGCCGTACAAGGAGGGATACTACTTCGACATTTGGG |
| | GCCAGGGGACTCTTGTCACCGTGTCCTCG (SEQ ID NO: 2647) |
| Heavy Chain | QVQLQQSGPGLVKPSQTLSLTCAISGDSVSSSSAAWNWIRQSPSRGLEWLGHI |
| | GYRSKWYNEYAVSVKSRITINPDTSKNQFSLQLNSVTPEDTAVYYCARGMYG |
| | SVPYKEGYYFDIWGQGTLVTVSSASTKGPSVFPLAPSSKSTSGGTAALGCLVK |
| | DYFPEPVTVSWNSGALTSGVHTFPAVLQSSGLYSLSSVVTVPSSSLGTQTYICN |
| | VNHKPSNTKVDKRVEPKSCDKTHTCPPCPAPELLGGPSVFLFPPKPKDTLMISR |
| | TPEVTCVVVDVSHEDPEVKFNWYVDGVEVHNAKTKPREEQYNSTYRVVSVL |
| | TVLHQDWLNGKEYKCKVSNKALPAPIEKTISKAKGQPREPQVYTLPPSREEMT |
| | KNQVSLTCLVKGFYPSDIAVEWESNGQPENNYKTTPPVLDSDGSFFLYSKLTV |
| | DKSRWQQGNVFSCSVMHEALHNHYTQKSLSLSPGK (SEQ ID NO: 2648) |
| DNA Heavy | CAAGTGCAACTCCAGCAGTCAGGACCGGGGTTGGTCAAGCCTTCGCAGAC |
| Chain | CCTGTCCCTCACTTGCGCCATTAGCGGAGATTCGGTGTCGTCGTCGTCAGC |
| | CGCCTGGAACTGGATTAGACAGTCCCCTTCCCGAGGGCTGGAGTGGCTGGG |
| | CCACATCGGATACCGCAGCAAGTGGTACAACGAATACGCCGTCAGCGTGA |
| | AGTCACGCATCACCATCAACCCGGATACTAGCAAGAACCAGTTCAGCCTCC |
| | AGTTGAACTCCGTGACCCCGGAGGATACCGCCGTGTACTACTGTGCGCGGG |
| | GCATGTACGGATCCGTGCCGTACAAGGAGGGATACTACTTCGACATTTGGG |
| | GCCAGGGGACTCTTGTCACCGTGTCCTCGGCCTCCACTAAGGGCCCAAGTG |
| | TGTTTCCCCTGGCCCCCAGCAGCAAGTCTACTTCCGGCGGAACTGCTGCCC |
| | TGGGTTGCCTGGTGAAGGACTACTTCCCCGAGCCCGTGACAGTGTCCTGGA |
| | ACTCTGGGGCTCTGACTTCCGGCGTGCACACCTTCCCCGCCGTGCTGCAGA |
| | GCAGCGGCCTGTACAGCCTGAGCAGCGTGGTGACAGTGCCCTCCAGCTCTC |
| | TGGGAACCCAGACCTATATCTGCAACGTGAACCACAAGCCCAGCAACACC |
| | AAGGTGGACAAGAGAGTGGAGCCCAAGAGCTGCGACAAGACCCACACCTG |
| | CCCCCCCTGCCCAGCTCCAGAACTGCTGGGAGGGCCTTCCGTGTTCCTGTT |
| | CCCCCCCAAGCCCAAGGACACCCTGATGATCAGCAGGACCCCCGAGGTGA |
| | CCTGCGTGGTGGTGGACGTGTCCCACGAGGACCCAGAGGTGAAGTTCAACT |
| | GGTACGTGGACGGCGTGGAGGTGCACAACGCCAAGACCAAGCCCAGAGAG |
| | GAGCAGTACAACAGCACCTACAGGGTGGTGTCCGTGCTGACCGTGCTGCA |
| | CCAGGACTGGCTGAACGGCAAAGAATACAAGTGCAAAGTCTCCAACAAGG |
| | CCCTGCCAGCCCCAATCGAAAAGACAATCAGCAAGGCCAAGGGCCAGCCA |
| | CGGGAGCCCCAGGTGTACACCCTGCCCCCCAGCCGGGAGGAGATGACCAA |
| | GAACCAGGTGTCCCTGACCTGTCTGGTGAAGGGCTTCTACCCCAGCGATAT |
| | CGCCGTGGAGTGGGAGAGCAACGGCCAGCCCGAGAACAACTACAAGACCA |
| | CCCCCCCAGTGCTGGACAGCGACGGCAGCTTCTTCCTGTACAGCAAGCTGA |
| | CCGTGGACAAGTCCAGGTGGCAGCAGGGCAACGTGTTCAGCTGCAGCGTG |
| | ATGCACGAGGCCCTGCACAACCACTACACCCAGAAGTCCCTGAGCCTGAG |
| | CCCCGGCAAG (SEQ ID NO: 2649) |
| LCDR1 | RASQGISSDLN (SEQ ID NO: 2636) |
| (Combined) | |
| LCDR2 | AASNLQS (SEQ ID NO: 2637) |
| (Combined) | |
| LCDR3 | QQYTDESMT (SEQ ID NO: 2638) |
| (Combined) | |
| LCDR1 | RASQGISSDLN (SEQ ID NO: 2636) |
| (Kabat) | |
| LCDR2 | AASNLQS (SEQ ID NO: 2637) |
| (Kabat) | |
| LCDR3 | QQYTDESMT (SEQ ID NO: 2638) |
| (Kabat) | |
| LCDR1 | SQGISSD (SEQ ID NO: 2639) |
| (Chothia) | |
| LCDR2 | AAS (SEQ ID NO: 2640) |
| (Chothia) | |
| LCDR3 | YTDESM (SEQ ID NO: 2641) |
| (Chothia) | |
| LCDR1 | QGISSD (SEQ ID NO: 2642) |
| (IMGT) | |
| LCDR2 | AAS (SEQ ID NO: 2640) |
| (IMGT) | |
| LCDR3 | QQYTDESMT (SEQ ID NO: 2638) |
| (IMGT) | |
| VL | DIQMTQSPSSLSASVGDRVTITCRASQGISSDLNWYQQKPGKAPKLLIYAASNL |
| | QSGVPSRFSGSGSGTDFTLTISSLQPEDFATYYCQQYTDESMTFGQGTKVEIK |
| | (SEQ ID NO: 2643) |
| DNA VL | GACATTCAGATGACCCAGTCCCCGTCGTCCCTGTCCGCATCCGTGGGCGAC |
| | AGAGTCACCATCACTTGCCGGGCCTCACAGGGAATTTCCTCCGACCTGAAC |
| | TGGTATCAGCAGAAGCCTGGAAAGGCCCCGAAGCTGCTGATCTACGCCGC |
| | GTCCAACTTGCAATCGGGAGTGCCAAGCCGCTTTTCTGGTTCCGGGAGCGG |
| | GACTGACTTCACCCTGACTATTAGCAGCCTGCAGCCCGAAGATTTCGCTAC |
| | CTACTACTGCCAACAGTACACAGATGAATCCATGACCTTCGGACAGGGCAC |
| | CAAAGTCGAGATCAAG (SEQ ID NO: 2650) |
| Light Chain | DIQMTQSPSSLSASVGDRVTITCRASQGISSDLNWYQQKPGKAPKLLIYAASNL |
| | QSGVPSRFSGSGSGTDFTLTISSLQPEDFATYYCQQYTDESMTFGQGTKVEIKR |
| | TVAAPSVFIFPPSDEQLKSGTASVVCLLNNFYPREAKVQWKVDNALQSGNSQE |
| | SVTEQDSKDSTYSLSSTLTLSKADYEKHKVYACEVTHQGLSSPVTKSFNRGEC |
| | (SEQ ID NO: 2645) |
| DNA Light | GACATTCAGATGACCCAGTCCCCGTCGTCCCTGTCCGCATCCGTGGGCGAC |
| Chain | AGAGTCACCATCACTTGCCGGGCCTCACAGGGAATTTCCTCCGACCTGAAC |
| | TGGTATCAGCAGAAGCCTGGAAAGGCCCCGAAGCTGCTGATCTACGCCGC |
| | GTCCAACTTGCAATCGGGAGTGCCAAGCCGCTTTTCTGGTTCCGGGAGCGG |
| | GACTGACTTCACCCTGACTATTAGCAGCCTGCAGCCCGAAGATTTCGCTAC |
| | CTACTACTGCCAACAGTACACAGATGAATCCATGACCTTCGGACAGGGCAC |
| | CAAAGTCGAGATCAAGCGTACGGTGGCCGCTCCCAGCGTGTTCATCTTCCC |
| | CCCCAGCGACGAGCAGCTGAAGAGCGGCACCGCCAGCGTGGTGTGCCTGC |
| | TGAACAACTTCTACCCCCGGGAGGCCAAGGTGCAGTGGAAGGTGGACAAC |
| | GCCCTGCAGAGCGGCAACAGCCAGGAGAGCGTCACCGAGCAGGACAGCA |
| | AGGACTCCACCTACAGCCTGAGCAGCACCCTGACCCTGAGCAAGGCCGAC |
| | TACGAGAAGCATAAGGTGTACGCCTGCGAGGTGACCCACCAGGGCCTGTC |
| | CAGCCCCGTGACCAAGAGCTTCAACAGGGGCGAGTGC (SEQ ID NO: 2651) |

MOR44746C

| | |
|---|---|
| HCDR1 | GDSVSSSSAAWN (SEQ ID NO: 2623) |
| (Combined) | |
| HCDR2 | HIGYRSKWYNEYAVSVKS (SEQ ID NO: 2624) |
| (Combined) | |
| HCDR3 | GMYGSVPYKEGYYFDI (SEQ ID NO: 2625) |
| (Combined) | |
| HCDR1 | SSSAAWN (SEQ ID NO: 2626) |
| (Kabat) | |
| HCDR2 | HIGYRSKWYNEYAVSVKS (SEQ ID NO: 2624) |
| (Kabat) | |
| HCDR3 | GMYGSVPYKEGYYFDI (SEQ ID NO: 2625) |
| (Kabat) | |
| HCDR1 | GDSVSSSSA (SEQ ID NO: 2627) |
| (Chothia) | |
| HCDR2 | GYRSKWY (SEQ ID NO: 2628) |
| (Chothia) | |
| HCDR3 | GMYGSVPYKEGYYFDI (SEQ ID NO: 2625) |
| (Chothia) | |
| HCDR1 | GDSVSSSSAA (SEQ ID NO: 2629) |
| (IMGT) | |
| HCDR2 | IGYRSKWYN (SEQ ID NO: 2630) |
| (IMGT) | |
| HCDR3 | ARGMYGSVPYKEGYYFDI (SEQ ID NO: 2631) |
| (IMGT) | |
| VH | QVQLQQSGPGLVKPSQTLSLTCAISGDSVSSSSAAWNWIRQSPSRGLEWLGHI |
| | GYRSKWYNEYAVSVKSRITINPDTSKNQFSLQLNSVTPEDTAVYYCARGMYG |
| | SVPYKEGYYFDIWGQGTLVTVSS (SEQ ID NO: 2632) |
| DNA VH | CAAGTGCAACTCCAGCAGTCAGGACCGGGGTTGGTCAAGCCTTCGCAGAC |
| | CCTGTCCCTCACTTGCGCCATTAGCGGAGATTCGGTGTCGTCGTCGTCAGC |
| | CGCCTGGAACTGGATTAGACAGTCCCCTTCCCGAGGGCTGGAGTGGCTGGG |
| | CCACATCGGATACCGCAGCAAGTGGTACAACGAATACGCCGTCAGCGTGA |
| | AGTCACGCATCACCATCAACCCGGATACTAGCAAGAACCAGTTCAGCCTCC |
| | AGTTGAACTCCGTGACCCCGGAGGATACCGCCGTGTACTACTGTGCGCGGG |
| | GCATGTACGGATCCGTGCCGTACAAGGAGGGATACTACTTCGACATTTGGG |
| | GCCAGGGGACTCTTGTCACCGTGTCCTCG (SEQ ID NO: 2647) |
| Heavy Chain | QVQLQQSGPGLVKPSQTLSLTCAISGDSVSSSSAAWNWIRQSPSRGLEWLGHI |
| | GYRSKWYNEYAVSVKSRITINPDTSKNQFSLQLNSVTPEDTAVYYCARGMYG |
| | SVPYKEGYYFDIWGQGTLVTVSSASTKGPSVFPLAPSSKSTSGGTAALGCLVK |
| | DYFPEPVTVSWNSGALTSGVHTFPAVLQSSGLYSLSSVVTVPSSSLGTQTYICN |
| | VNHKPSNTKVDKRVEPKSCDKTHTCPPCPAPELLGGPSVFLFPPKPKDTLMISR |
| | TPEVTCVVVAVSHEDPEVKFNWYVDGVEVHNAKTKPREEQYNSTYRVVSVL |
| | TVLHQDWLNGKEYKCKVSNKALAAPIEKTISKAKGQPREPQVYTLPPSREEMT |
| | KNQVSLTCLVKGFYPSDIAVEWESNGQPENNYKTTPPVLDSDGSFFLYSKLTV |
| | DKSRWQQGNVFSCSVMHEALHNHYTQKSLSLSPGK (SEQ ID NO: 2652) |
| DNA Heavy | CAAGTGCAACTCCAGCAGTCAGGACCGGGGTTGGTCAAGCCTTCGCAGAC |
| Chain | CCTGTCCCTCACTTGCGCCATTAGCGGAGATTCGGTGTCGTCGTCGTCAGC |
| | CGCCTGGAACTGGATTAGACAGTCCCCTTCCCGAGGGCTGGAGTGGCTGGG |
| | CCACATCGGATACCGCAGCAAGTGGTACAACGAATACGCCGTCAGCGTGA |
| | AGTCACGCATCACCATCAACCCGGATACTAGCAAGAACCAGTTCAGCCTCC |
| | AGTTGAACTCCGTGACCCCGGAGGATACCGCCGTGTACTACTGTGCGCGGG |
| | GCATGTACGGATCCGTGCCGTACAAGGAGGGATACTACTTCGACATTTGGG |
| | GCCAGGGGACTCTTGTCACCGTGTCCTCGGCCTCCACTAAGGGCCCGTCAG |
| | TGTTCCCCCTTGCGCCATCCTCGAAGTCAACCTCCGGAGGAACTGCCGCAC |
| | TGGGTTGCCTCGTGAAAGACTATTTCCCGGAACCCGTCACTGTCTCCTGGA |
| | ACTCAGGAGCGCTCACCAGCGGAGTGCATACCTTTCCTGCGGTGCTGCAGT |
| | CCAGCGGCCTGTACTCCCTGAGCTCCGTCGTGACCGTCCCCTCGTCGTCCCT |
| | GGGAACCCAAACCTACATTTGCAACGTCAATCACAAGCCAAGCAACACTA |
| | AGGTGGACAAGAGAGTGGAGCCCAAGTCCTGCGATAAGACCCACACCTGT |
| | CCTCCCTGTCCGGCACCTGAACTGCTTGGTGGACCTTCCGTGTTCCTGTTCC |
| | CGCCCAAGCCAAAAGACACCCTGATGATCTCCCGCACTCCGGAAGTCACTT |
| | GCGTGGTCGTGGCCGTGTCCCACGAGGACCCCGAGGTCAAGTTTAATTGGT |
| | ACGTGGACGGAGTGGAAGTGCACAACGCCAAGACCAAGCCGCGGGAAGA |
| | ACAGTACAACTCCACCTACCGCGTGGTGTCCGTCCTGACTGTGCTCCACCA |
| | GGACTGGCTGAACGGAAAGGAGTACAAGTGCAAAGTGTCCAACAAGGCAC |
| | TGGCTGCCCCTATCGAAAAGACTATCTCCAAGGCCAAGGGCCAACCTAGG |
| | GAGCCCCAGGTGTACACGTTGCCTCCTTCCCGCGAAGAAATGACTAAGAAC |
| | CAGGTGTCGCTGACCTGTCTCGTGAAAGGGTTCTACCCCTCTGACATCGCC |
| | GTGGAATGGGAGTCAAACGGACAGCCTGAGAACAACTATAAGACCACACC |
| | ACCTGTCCTGGACTCCGACGGCTCCTTCTTCCTGTACTCAAAGTTGACCGTG |
| | GACAAGTCGCGGTGGCAACAGGGCAACGTGTTCTCTTGCTCCGTGATGCAC |
| | GAAGCCCTGCACAACCACTACACCCAAAAGTCGCTCAGCCTCTCCCCCGGA |
| | AAG (SEQ ID NO: 2653) |
| LCDR1 | RASQGISSDLN (SEQ ID NO: 2636) |
| (Combined) | |
| LCDR2 | AASNLQS (SEQ ID NO: 2637) |
| (Combined) | |
| LCDR3 | QQYTDESMT (SEQ ID NO: 2638) |
| (Combined) | |
| LCDR1 | RASQGISSDLN (SEQ ID NO: 2636) |
| (Kabat) | |
| LCDR2 | AASNLQS (SEQ ID NO: 2637) |
| (Kabat) | |
| LCDR3 | QQYTDESMT (SEQ ID NO: 2638) |
| (Kabat) | |
| LCDR1 | SQGISSD (SEQ ID NO: 2639) |
| (Chothia) | |
| LCDR2 | AAS (SEQ ID NO: 2640) |
| (Chothia) | |
| LCDR3 | YTDESM (SEQ ID NO: 2641) |
| (Chothia) | |
| LCDR1 | (SEQ ID NO: 2642) |
| (IMGT) | |
| LCDR2 | AAS (SEQ ID NO: 2640) |
| (IMGT) | |
| LCDR3 | QQYTDESMT (SEQ ID NO: 2638) |
| (IMGT) | |
| VL | DIQMTQSPSSLSASVGDRVTITCRASQGISSDLNWYQQKPGKAPKLLIYAASNL |
| | QSGVPSRFSGSGSGTDFTLTISSLQPEDFATYYCQQYTDESMTFGQGTKVEIK |
| | (SEQ ID NO: 2643) |
| DNA VL | GACATTCAGATGACCCAGTCCCCGTCGTCCCTGTCCGCATCCGTGGGCGAC |
| | AGAGTCACCATCACTTGCCGGGCCTCACAGGGAATTTCCTCCGACCTGAAC |
| | TGGTATCAGCAGAAGCCTGGAAAGGCCCCGAAGCTGCTGATCTACGCCGC |
| | GTCCAACTTGCAATCGGGAGTGCCAAGCCGCTTTTCTGGTTCCGGGAGCGG |
| | GACTGACTTCACCCTGACTATTAGCAGCCTGCAGCCCGAAGATTTCGCTAC |
| | CTACTACTGCCAACAGTACACAGATGAATCCATGACCTTCGGACAGGGCAC |
| | CAAAGTCGAGATCAAG (SEQ ID NO: 2650) |
| Light Chain | DIQMTQSPSSLSASVGDRVTITCRASQGISSDLNWYQQKPGKAPKLLIYAASNL |
| | QSGVPSRFSGSGSGTDFTLTISSLQPEDFATYYCQQYTDESMTFGQGTKVEIKR |
| | TVAAPSVFIFPPSDEQLKSGTASVVCLLNNFYPREAKVQWKVDNALQSGNSQE |
| | SVTEQDSKDSTYSLSSTLTLSKADYEKHKVYACEVTHQGLSSPVTKSFNRGEC |
| | (SEQ ID NO: 2645) |
| DNA Light | GACATTCAGATGACCCAGTCCCCGTCGTCCCTGTCCGCATCCGTGGGCGAC |
| Chain | AGAGTCACCATCACTTGCCGGGCCTCACAGGGAATTTCCTCCGACCTGAAC |
| | TGGTATCAGCAGAAGCCTGGAAAGGCCCCGAAGCTGCTGATCTACGCCGC |
| | GTCCAACTTGCAATCGGGAGTGCCAAGCCGCTTTTCTGGTTCCGGGAGCGG |
| | GACTGACTTCACCCTGACTATTAGCAGCCTGCAGCCCGAAGATTTCGCTAC |
| | CTACTACTGCCAACAGTACACAGATGAATCCATGACCTTCGGACAGGGCAC |
| | CAAAGTCGAGATCAAGCGTACGGTGGCCGCTCCCAGCGTGTTCATCTTCCC |
| | CCCCAGCGACGAGCAGCTGAAGAGCGGCACCGCCAGCGTGGTGTGCCTGC |
| | TGAACAACTTCTACCCCCGGGAGGCCAAGGTGCAGTGGAAGGTGGACAAC |
| | GCCCTGCAGAGCGGCAACAGCCAGGAGAGCGTCACCGAGCAGGACAGCA |
| | AGGACTCCACCTACAGCCTGAGCAGCACCCTGACCCTGAGCAAGGCCGAC |
| | TACGAGAAGCATAAGGTGTACGCCTGCGAGGTGACCCACCAGGGCCTGTC |
| | CAGCCCCGTGACCAAGAGCTTCAACAGGGGCGAGTGC (SEQ ID NO: 2651) |

MOR44746D

| | |
|---|---|
| HCDR1 | GDSVSSSSAAWN (SEQ ID NO: 2623) |
| (Combined) | |
| HCDR2 | HIGYRSKWYNEYAVSVKS (SEQ ID NO: 2624) |
| (Combined) | |
| HCDR3 | GMYGSVPYKEGYYFDI (SEQ ID NO: 2625) |
| (Combined) | |
| HCDR1 | SSSAAWN (SEQ ID NO: 2626) |
| (Kabat) | |
| HCDR2 | HIGYRSKWYNEYAVSVKS (SEQ ID NO: 2624) |
| (Kabat) | |
| HCDR3 | GMYGSVPYKEGYYFDI (SEQ ID NO: 2625) |
| (Kabat) | |
| HCDR1 | GDSVSSSSA (SEQ ID NO: 2627) |
| (Chothia) | |
| HCDR2 | GYRSKWY (SEQ ID NO: 2628) |
| (Chothia) | |
| HCDR3 | GMYGSVPYKEGYYFDI (SEQ ID NO: 2625) |
| (Chothia) | |
| HCDR1 | GDSVSSSSAA (SEQ ID NO: 2629) |
| (IMGT) | |
| HCDR2 | IGYRSKWYN (SEQ ID NO: 2630) |
| (IMGT) | |
| HCDR3 | ARGMYGSVPYKEGYYFDI (SEQ ID NO: 2631) |
| (IMGT) | |
| VH | QVQLQQSGPGLVKPSQTLSLTCAISGDSVSSSSAAWNWIRQSPSRGLEWLGHI |
| | GYRSKWYNEYAVSVKSRITINPDTSKNQFSLQLNSVTPEDTAVYYCARGMYG |
| | SVPYKEGYYFDIWGQGTLVTVSS (SEQ ID NO: 2632) |
| DNA VH | CAAGTGCAACTCCAGCAGTCAGGACCGGGGTTGGTCAAGCCTTCGCAGAC |
| | CCTGTCCCTCACTTGCGCCATTAGCGGAGATTCGGTGTCGTCGTCGTCAGC |
| | CGCCTGGAACTGGATTAGACAGTCCCCTTCCCGAGGGCTGGAGTGGCTGGG |
| | CCACATCGGATACCGCAGCAAGTGGTACAACGAATACGCCGTCAGCGTGA |
| | AGTCACGCATCACCATCAACCCGGATACTAGCAAGAACCAGTTCAGCCTCC |
| | AGTTGAACTCCGTGACCCCGGAGGATACCGCCGTGTACTACTGTGCGCGGG |
| | GCATGTACGGATCCGTGCCGTACAAGGAGGGATACTACTTCGACATTTGGG |
| | GCCAGGGGACTCTTGTCACCGTGTCCTCG (SEQ ID NO: 2647) |
| Heavy Chain | QVQLQQSGPGLVKPSQTLSLTCAISGDSVSSSSAAWNWIRQSPSRGLEWLGHI |
| | GYRSKWYNEYAVSVKSRITINPDTSKNQFSLQLNSVTPEDTAVYYCARGMYG |
| | SVPYKEGYYFDIWGQGTLVTVSSASTKGPSVFPLAPSSKSTSGGTAALGCLVK |
| | DYFPEPVTVSWNSGALTSGVHTFPAVLQSSGLYSLSSVVTVPSSSLGTQTYICN |
| | VNHKPSNTKVDKRVEPKSCDKTHTCPPCPAPELLGGPSVFLFPPKPKDTLMISR |
| | TPEVTCVVVDVSHEDPEVKFNWYVDGVEVHNAKTKPREEQYNSTYRVVSVL |
| | TVLHQDWLNGKEYKCKVSNKALPAPIEKTISKAKGQPREPQVYTLPPSREEMT |
| | KNQVSLTCLVKGFYPSDIAVEWESNGQPENNYKTTPPVLDSDGSFFLYSKLTV |
| | DKSRWQQGNVFSCSVLHEALHSHYTQKSLSLSPGK (SEQ ID NO: 2654) |
| DNA Heavy | CAAGTGCAACTCCAGCAGTCAGGACCGGGGTTGGTCAAGCCTTCGCAGAC |
| Chain | CCTGTCCCTCACTTGCGCCATTAGCGGAGATTCGGTGTCGTCGTCGTCAGC |
| | CGCCTGGAACTGGATTAGACAGTCCCCTTCCCGAGGGCTGGAGTGGCTGGG |
| | CCACATCGGATACCGCAGCAAGTGGTACAACGAATACGCCGTCAGCGTGA |
| | AGTCACGCATCACCATCAACCCGGATACTAGCAAGAACCAGTTCAGCCTCC |
| | AGTTGAACTCCGTGACCCCGGAGGATACCGCCGTGTACTACTGTGCGCGGG |
| | GCATGTACGGATCCGTGCCGTACAAGGAGGGATACTACTTCGACATTTGGG |
| | GCCAGGGGACTCTTGTCACCGTGTCCTCGGCCTCCACTAAGGGCCCGTCAG |
| | TGTTCCCCCTTGCGCCATCCTCGAAGTCAACCTCCGGAGGAACTGCCGCAC |
| | TGGGTTGCCTCGTGAAAGACTATTTCCCGGAACCCGTCACTGTCTCCTGGA |
| | ACTCAGGAGCGCTCACCAGCGGAGTGCATACCTTTCCTGCGGTGCTGCAGT |
| | CCAGCGGCCTGTACTCCCTGAGCTCCGTCGTGACCGTCCCCTCGTCGTCCCT |
| | GGGAACCCAAACCTACATTTGCAACGTCAATCACAAGCCAAGCAACACTA |
| | AGGTGGACAAGAGAGTGGAGCCCAAGTCCTGCGATAAGACCCACACCTGT |
| | CCTCCCTGTCCGGCACCTGAACTGCTTGGTGGACCTTCCGTGTTCCTGTTCC |
| | CGCCCAAGCCAAAAGACACCCTGATGATCTCCCGCACTCCGGAAGTCACTT |
| | GCGTGGTCGTGGACGTGTCCCACGAGGACCCCGAGGTCAAGTTTAATTGGT |
| | ACGTGGACGGAGTGGAAGTGCACAACGCCAAGACCAAGCCGCGGGAAGA |
| | ACAGTACAACTCCACCTACCGCGTGGTGTCCGTCCTGACTGTGCTCCACCA |
| | GGACTGGCTGAACGGAAAGGAGTACAAGTGCAAAGTGTCCAACAAGGCAC |
| | TGCCAGCCCCTATCGAAAAGACTATCTCCAAGGCCAAGGGCCAACCTAGG |
| | GAGCCCCAGGTGTACACGTTGCCTCCTTCCCGCGAAGAAATGACTAAGAAC |
| | CAGGTGTCGCTGACCTGTCTCGTGAAAGGGTTCTACCCCTCTGACATCGCC |
| | GTGGAATGGGAGTCAAACGGACAGCCTGAGAACAACTATAAGACCACACC |
| | ACCTGTCCTGGACTCCGACGGCTCCTTCTTCCTGTACTCAAAGTTGACCGTG |
| | GACAAGTCGCGGTGGCAACAGGGCAACGTGTTCTCTTGCTCCGTGCTGCAC |
| | GAAGCCCTGCACAGCCACTACACCCAAAAGTCGCTCAGCCTCTCCCCCGGA |
| | AAG (SEQ ID NO: 2655) |
| LCDR1 | RASQGISSDLN (SEQ ID NO: 2636) |
| (Combined) | |
| LCDR2 | AASNLQS (SEQ ID NO: 2637) |
| (Combined) | |
| LCDR3 | QQYTDESMT (SEQ ID NO: 2638) |
| (Combined) | |
| LCDR1 | RASQGISSDLN (SEQ ID NO: 2636) |
| (Kabat) | |
| LCDR2 | AASNLQS (SEQ ID NO: 2637) |
| (Kabat) | |
| LCDR3 | QQYTDESMT (SEQ ID NO: 2638) |
| (Kabat) | |
| LCDR1 | SQGISSD (SEQ ID NO: 2639) |
| (Chothia) | |
| LCDR2 | AAS (SEQ ID NO: 2640) |
| (Chothia) | |
| LCDR3 | YTDESM (SEQ ID NO: 2641) |
| (Chothia) | |
| LCDR1 | QGISSD (SEQ ID NO: 2642) |
| (IMGT) | |
| LCDR2 | AAS (SEQ ID NO: 2640) |
| (IMGT) | |
| LCDR3 | QQYTDESMT (SEQ ID NO: 2638) |
| (IMGT) | |
| VL | DIQMTQSPSSLSASVGDRVTITCRASQGISSDLNWYQQKPGKAPKLLIYAASNL |
| | QSGVPSRFSGSGSGTDFTLTISSLQPEDFATYYCQQYTDESMTFGQGTKVEIK |
| | (SEQ ID NO: 2643) |
| DNA VL | GACATTCAGATGACCCAGTCCCCGTCGTCCCTGTCCGCATCCGTGGGCGAC |
| | AGAGTCACCATCACTTGCCGGGCCTCACAGGGAATTTCCTCCGACCTGAAC |
| | TGGTATCAGCAGAAGCCTGGAAAGGCCCCGAAGCTGCTGATCTACGCCGC |
| | GTCCAACTTGCAATCGGGAGTGCCAAGCCGCTTTTCTGGTTCCGGGAGCGG |
| | GACTGACTTCACCCTGACTATTAGCAGCCTGCAGCCCGAAGATTTCGCTAC |
| | CTACTACTGCCAACAGTACACAGATGAATCCATGACCTTCGGACAGGGCAC |
| | CAAAGTCGAGATCAAG (SEQ ID NO: 2650) |
| Light Chain | DIQMTQSPSSLSASVGDRVTITCRASQGISSDLNWYQQKPGKAPKLLIYAASNL |
| | QSGVPSRFSGSGSGTDFTLTISSLQPEDFATYYCQQYTDESMTFGQGTKVEIKR |
| | TVAAPSVFIFPPSDEQLKSGTASVVCLLNNFYPREAKVQWKVDNALQSGNSQE |
| | SVTEQDSKDSTYSLSSTLTLSKADYEKHKVYACEVTHQGLSSPVTKSFNRGEC |
| | (SEQ ID NO: 2645) |
| DNA Light | GACATTCAGATGACCCAGTCCCCGTCGTCCCTGTCCGCATCCGTGGGCGAC |
| Chain | AGAGTCACCATCACTTGCCGGGCCTCACAGGGAATTTCCTCCGACCTGAAC |
| | TGGTATCAGCAGAAGCCTGGAAAGGCCCCGAAGCTGCTGATCTACGCCGC |
| | GTCCAACTTGCAATCGGGAGTGCCAAGCCGCTTTTCTGGTTCCGGGAGCGG |
| | GACTGACTTCACCCTGACTATTAGCAGCCTGCAGCCCGAAGATTTCGCTAC |
| | CTACTACTGCCAACAGTACACAGATGAATCCATGACCTTCGGACAGGGCAC |
| | CAAAGTCGAGATCAAGCGTACGGTGGCCGCTCCCAGCGTGTTCATCTTCCC |
| | CCCCAGCGACGAGCAGCTGAAGAGCGGCACCGCCAGCGTGGTGTGCCTGC |
| | TGAACAACTTCTACCCCCGGGAGGCCAAGGTGCAGTGGAAGGTGGACAAC |
| | GCCCTGCAGAGCGGCAACAGCCAGGAGAGCGTCACCGAGCAGGACAGCA |
| | AGGACTCCACCTACAGCCTGAGCAGCACCCTGACCCTGAGCAAGGCCGAC |
| | TACGAGAAGCATAAGGTGTACGCCTGCGAGGTGACCCACCAGGGCCTGTC |
| | CAGCCCCGTGACCAAGAGCTTCAACAGGGGCGAGTGC (SEQ ID NO: 2651) |

MOR44746E

| | |
|---|---|
| HCDR1 | GDSVSSSSAAWN (SEQ ID NO: 2623) |
| (Combined) | |
| HCDR2 | HIGYRSKWYNEYAVSVKS (SEQ ID NO: 2624) |
| (Combined) | |
| HCDR3 | GMYGSVPYKEGYYFDI (SEQ ID NO: 2625) |
| (Combined) | |
| HCDR1 | SSSAAWN (SEQ ID NO: 2626) |
| (Kabat) | |
| HCDR2 | HIGYRSKWYNEYAVSVKS (SEQ ID NO: 2624) |
| (Kabat) | |
| HCDR3 | GMYGSVPYKEGYYFDI (SEQ ID NO: 2625) |
| (Kabat) | |
| HCDR1 | GDSVSSSSA (SEQ ID NO: 2627) |
| (Chothia) | |
| HCDR2 | GYRSKWY (SEQ ID NO: 2628) |
| (Chothia) | |
| HCDR3 | GMYGSVPYKEGYYFDI (SEQ ID NO: 2625) |
| (Chothia) | |
| HCDR1 | GDSVSSSSAA (SEQ ID NO: 2629) |
| (IMGT) | |
| HCDR2 | IGYRSKWYN (SEQ ID NO: 2630) |
| (IMGT) | |
| HCDR3 | ARGMYGSVPYKEGYYFDI (SEQ ID NO: 2631) |
| (IMGT) | |
| VH | QVQLQQSGPGLVKPSQTLSLTCAISGDSVSSSSAAWNWIRQSPSRGLEWLGHI |
| | GYRSKWYNEYAVSVKSRITINPDTSKNQFSLQLNSVTPEDTAVYYCARGMYG |
| | SVPYKEGYYFDIWGQGTLVTVSS (SEQ ID NO: 2632) |
| DNA VH | CAAGTGCAACTCCAGCAGTCAGGACCGGGGTTGGTCAAGCCTTCGCAGAC |
| | CCTGTCCCTCACTTGCGCCATTAGCGGAGATTCGGTGTCGTCGTCGTCAGC |
| | CGCCTGGAACTGGATTAGACAGTCCCCTTCCCGAGGGCTGGAGTGGCTGGG |
| | CCACATCGGATACCGCAGCAAGTGGTACAACGAATACGCCGTCAGCGTGA |
| | AGTCACGCATCACCATCAACCCGGATACTAGCAAGAACCAGTTCAGCCTCC |
| | AGTTGAACTCCGTGACCCCGGAGGATACCGCCGTGTACTACTGTGCGCGGG |
| | GCATGTACGGATCCGTGCCGTACAAGGAGGGATACTACTTCGACATTTGGG |
| | GCCAGGGGACTCTTGTCACCGTGTCCTCG (SEQ ID NO: 2647) |
| Heavy Chain | QVQLQQSGPGLVKPSQTLSLTCAISGDSVSSSSAAWNWIRQSPSRGLEWLGHI |
| | GYRSKWYNEYAVSVKSRITINPDTSKNQFSLQLNSVTPEDTAVYYCARGMYG |
| | SVPYKEGYYFDIWGQGTLVTVSSASTKGPSVFPLAPSSKSTSGGTAALGCLVK |
| | DYFPEPVTVSWNSGALTSGVHTFPAVLQSSGLYSLSSVVTVPSSSLGTQTYICN |
| | VNHKPSNTKVDKRVEPKSCDKTHTCPPCPAPELLGGPSVFLFPPKPKDTLMISR |
| | TPEVTCVVVAVSHEDPEVKFNWYVDGVEVHNAKTKPREEQYNSTYRVVSVL |
| | TVLHQDWLNGKEYKCKVSNKALAAPIEKTISKAKGQPREPQVYTLPPSREEMT |
| | KNQVSLTCLVKGFYPSDIAVEWESNGQPENNYKTTPPVLDSDGSFFLYSKLTV |
| | DKSRWQQGNVFSCSVLHEALHSHYTQKSLSLSPGK (SEQ ID NO: 2656) |
| DNA Heavy | CAAGTGCAACTCCAGCAGTCAGGACCGGGGTTGGTCAAGCCTTCGCAGAC |
| Chain | CCTGTCCCTCACTTGCGCCATTAGCGGAGATTCGGTGTCGTCGTCGTCAGC |
| | CGCCTGGAACTGGATTAGACAGTCCCCTTCCCGAGGGCTGGAGTGGCTGGG |
| | CCACATCGGATACCGCAGCAAGTGGTACAACGAATACGCCGTCAGCGTGA |
| | AGTCACGCATCACCATCAACCCGGATACTAGCAAGAACCAGTTCAGCCTCC |
| | AGTTGAACTCCGTGACCCCGGAGGATACCGCCGTGTACTACTGTGCGCGGG |
| | GCATGTACGGATCCGTGCCGTACAAGGAGGGATACTACTTCGACATTTGGG |
| | GCCAGGGGACTCTTGTCACCGTGTCCTCGGCCTCCACTAAGGGCCCGTCAG |
| | TGTTCCCCCTTGCGCCATCCTCGAAGTCAACCTCCGGAGGAACTGCCGCAC |
| | TGGGTTGCCTCGTGAAAGACTATTTCCCGGAACCCGTCACTGTCTCCTGGA |
| | ACTCAGGAGCGCTCACCAGCGGAGTGCATACCTTTCCTGCGGTGCTGCAGT |
| | CCAGCGGCCTGTACTCCCTGAGCTCCGTCGTGACCGTCCCCTCGTCGTCCCT |
| | GGGAACCCAAACCTACATTTGCAACGTCAATCACAAGCCAAGCAACACTA |
| | AGGTGGACAAGAGAGTGGAGCCCAAGTCCTGCGATAAGACCCACACCTGT |
| | CCTCCCTGTCCGGCACCTGAACTGCTTGGTGGACCTTCCGTGTTCCTGTTCC |
| | CGCCCAAGCCAAAAGACACCCTGATGATCTCCCGCACTCCGGAAGTCACTT |
| | GCGTGGTCGTGGCCGTGTCCCACGAGGACCCCGAGGTCAAGTTTAATTGGT |
| | ACGTGGACGGAGTGGAAGTGCACAACGCCAAGACCAAGCCGCGGGAAGA |
| | ACAGTACAACTCCACCTACCGCGTGGTGTCCGTCCTGACTGTGCTCCACCA |
| | GGACTGGCTGAACGGAAAGGAGTACAAGTGCAAAGTGTCCAACAAGGCAC |
| | TGGCTGCCCCTATCGAAAAGACTATCTCCAAGGCCAAGGGCCAACCTAGG |
| | GAGCCCCAGGTGTACACGTTGCCTCCTTCCCGCGAAGAAATGACTAAGAAC |
| | CAGGTGTCGCTGACCTGTCTCGTGAAAGGGTTCTACCCCTCTGACATCGCC |
| | GTGGAATGGGAGTCAAACGGACAGCCTGAGAACAACTATAAGACCACACC |
| | ACCTGTCCTGGACTCCGACGGCTCCTTCTTCCTGTACTCAAAGTTGACCGTG |
| | GACAAGTCGCGGTGGCAACAGGGCAACGTGTTCTCTTGCTCCGTGCTGCAC |
| | GAAGCCCTGCACAGCCACTACACCCAAAAGTCGCTCAGCCTCTCCCCCGGA |
| | AAG (SEQ ID NO: 2657) |
| LCDR1 | RASQGISSDLN (SEQ ID NO: 2636) |
| (Combined) | |
| LCDR2 | AASNLQS (SEQ ID NO: 2637) |
| (Combined) | |
| LCDR3 | QQYTDESMT (SEQ ID NO: 2638) |
| (Combined) | |
| LCDR1 | RASQGISSDLN (SEQ ID NO: 2636) |
| (Kabat) | |
| LCDR2 | AASNLQS (SEQ ID NO: 2637) |
| (Kabat) | |
| LCDR3 | QQYTDESMT (SEQ ID NO: 2638) |
| (Kabat) | |
| LCDR1 | SQGISSD (SEQ ID NO: 2639) |
| (Chothia) | |
| LCDR2 | AAS (SEQ ID NO: 2640) |
| (Chothia) | |
| LCDR3 | YTDESM (SEQ ID NO: 2641) |
| (Chothia) | |
| LCDR1 | QGISSD (SEQ ID NO: 2642) |
| (IMGT) | |
| LCDR2 | AAS (SEQ ID NO: 2640) |
| (IMGT) | |
| LCDR3 | QQYTDESMT (SEQ ID NO: 2638) |
| (IMGT) | |
| VL | DIQMTQSPSSLSASVGDRVTITCRASQGISSDLNWYQQKPGKAPKLLIYAASNL |
| | (SEQ ID NO: 2643) |
| DNA VL | GACATTCAGATGACCCAGTCCCCGTCGTCCCTGTCCGCATCCGTGGGCGAC |
| | AGAGTCACCATCACTTGCCGGGCCTCACAGGGAATTTCCTCCGACCTGAAC |
| | TGGTATCAGCAGAAGCCTGGAAAGGCCCCGAAGCTGCTGATCTACGCCGC |
| | GTCCAACTTGCAATCGGGAGTGCCAAGCCGCTTTTCTGGTTCCGGGAGCGG |
| | GACTGACTTCACCCTGACTATTAGCAGCCTGCAGCCCGAAGATTTCGCTAC |
| | CTACTACTGCCAACAGTACACAGATGAATCCATGACCTTCGGACAGGGCAC |
| | CAAAGTCGAGATCAAG (SEQ ID NO: 2650) |
| Light Chain | DIQMTQSPSSLSASVGDRVTITCRASQGISSDLNWYQQKPGKAPKLLIYAASNL |
| | QSGVPSRFSGSGSGTDFTLTISSLQPEDFATYYCQQYTDESMTFGQGTKVEIKR |
| | TVAAPSVFIFPPSDEQLKSGTASVVCLLNNFYPREAKVQWKVDNALQSGNSQE |
| | SVTEQDSKDSTYSLSSTLTLSKADYEKHKVYACEVTHQGLSSPVTKSFNRGEC |
| | (SEQ ID NO: 2645) |
| DNA Light | GACATTCAGATGACCCAGTCCCCGTCGTCCCTGTCCGCATCCGTGGGCGAC |
| Chain | AGAGTCACCATCACTTGCCGGGCCTCACAGGGAATTTCCTCCGACCTGAAC |
| | TGGTATCAGCAGAAGCCTGGAAAGGCCCCGAAGCTGCTGATCTACGCCGC |
| | GTCCAACTTGCAATCGGGAGTGCCAAGCCGCTTTTCTGGTTCCGGGAGCGG |
| | GACTGACTTCACCCTGACTATTAGCAGCCTGCAGCCCGAAGATTTCGCTAC |
| | CTACTACTGCCAACAGTACACAGATGAATCCATGACCTTCGGACAGGGCAC |
| | CAAAGTCGAGATCAAGCGTACGGTGGCCGCTCCCAGCGTGTTCATCTTCCC |
| | CCCCAGCGACGAGCAGCTGAAGAGCGGCACCGCCAGCGTGGTGTGCCTGC |
| | TGAACAACTTCTACCCCCGGGAGGCCAAGGTGCAGTGGAAGGTGGACAAC |
| | GCCCTGCAGAGCGGCAACAGCCAGGAGAGCGTCACCGAGCAGGACAGCA |
| | AGGACTCCACCTACAGCCTGAGCAGCACCCTGACCCTGAGCAAGGCCGAC |
| | TACGAGAAGCATAAGGTGTACGCCTGCGAGGTGACCCACCAGGGCCTGTC |
| | CAGCCCCGTGACCAAGAGCTTCAACAGGGGCGAGTGC (SEQ ID NO: 2651) |

MOR44746F

| | |
|---|---|
| HCDR1 | GDSVSSSSAAWN (SEQ ID NO: 2623) |
| (Combined) | |
| HCDR2 | HIGYRSKWYNEYAVSVKS (SEQ ID NO: 2624) |
| (Combined) | |
| HCDR3 | GMYGSVPYKEGYYFDI (SEQ ID NO: 2625) |
| (Combined) | |
| HCDR1 | SSSAAWN (SEQ ID NO: 2626) |
| (Kabat) | |
| HCDR2 | HIGYRSKWYNEYAVSVKS (SEQ ID NO: 2624) |
| (Kabat) | |
| HCDR3 | GMYGSVPYKEGYYFDI (SEQ ID NO: 2625) |
| (Kabat) | |
| HCDR1 | GDSVSSSSA (SEQ ID NO: 2627) |
| (Chothia) | |
| HCDR2 | GYRSKWY (SEQ ID NO: 2628) |
| (Chothia) | |
| HCDR3 | GMYGSVPYKEGYYFDI (SEQ ID NO: 2625) |
| (Chothia) | |
| HCDR1 | GDSVSSSSAA (SEQ ID NO: 2629) |
| (IMGT) | |
| HCDR2 | IGYRSKWYN (SEQ ID NO: 2630) |
| (IMGT) | |
| HCDR3 | ARGMYGSVPYKEGYYFDI (SEQ ID NO: 2631) |
| (IMGT) | |
| VH | QVQLQQSGPGLVKPSQTLSLTCAISGDSVSSSSAAWNWIRQSPSRGLEWLGHI |
| | GYRSKWYNEYAVSVKSRITINPDTSKNQFSLQLNSVTPEDTAVYYCARGMYG |
| | SVPYKEGYYFDIWGQGTLVTVSS (SEQ ID NO: 2632) |
| DNA VH | CAAGTGCAACTCCAGCAGTCAGGACCGGGGTTGGTCAAGCCTTCGCAGAC |
| | CCTGTCCCTCACTTGCGCCATTAGCGGAGATTCGGTGTCGTCGTCGTCAGC |
| | CGCCTGGAACTGGATTAGACAGTCCCCTTCCCGAGGGCTGGAGTGGCTGGG |
| | CCACATCGGATACCGCAGCAAGTGGTACAACGAATACGCCGTCAGCGTGA |
| | AGTCACGCATCACCATCAACCCGGATACTAGCAAGAACCAGTTCAGCCTCC |
| | AGTTGAACTCCGTGACCCCGGAGGATACCGCCGTGTACTACTGTGCGCGGG |
| | GCATGTACGGATCCGTGCCGTACAAGGAGGGATACTACTTCGACATTTGGG |
| | GCCAGGGGACTCTTGTCACCGTGTCCTCG (SEQ ID NO: 2647) |
| Heavy Chain | QVQLQQSGPGLVKPSQTLSLTCAISGDSVSSSSAAWNWIRQSPSRGLEWLGHI |
| | GYRSKWYNEYAVSVKSRITINPDTSKNQFSLQLNSVTPEDTAVYYCARGMYG |
| | SVPYKEGYYFDIWGQGTLVTVSSASTKGPSVFPLAPSSKSTSGGTAALGCLVK |
| | DYFPEPVTVSWNSGALTSGVHTFPAVLQSSGLYSLSSVVTVPSSSLGTQTYICN |
| | VNHKPSNTKVDKRVEPKSCDKTHTCPPCPAPELLGGPSVFLFPPKPKDTLYITR |
| | EPEVTCVVVDVSHEDPEVKFNWYVDGVEVHNAKTKPREEQYNSTYRVVSVL |
| | TVLHQDWLNGKEYKCKVSNKALPAPIEKTISKAKGQPREPQVYTLPPSREEMT |
| | KNQVSLTCLVKGFYPSDIAVEWESNGQPENNYKTTPPVLDSDGSFFLYSKLTV |
| | DKSRWQQGNVFSCSVMHEALHNHYTQKSLSLSPGK (SEQ ID NO: 2658) |
| DNA Heavy | CAAGTGCAACTCCAGCAGTCAGGACCGGGGTTGGTCAAGCCTTCGCAGAC |
| Chain | CCTGTCCCTCACTTGCGCCATTAGCGGAGATTCGGTGTCGTCGTCGTCAGC |
| | CGCCTGGAACTGGATTAGACAGTCCCCTTCCCGAGGGCTGGAGTGGCTGGG |
| | CCACATCGGATACCGCAGCAAGTGGTACAACGAATACGCCGTCAGCGTGA |
| | AGTCACGCATCACCATCAACCCGGATACTAGCAAGAACCAGTTCAGCCTCC |
| | AGTTGAACTCCGTGACCCCGGAGGATACCGCCGTGTACTACTGTGCGCGGG |
| | GCATGTACGGATCCGTGCCGTACAAGGAGGGATACTACTTCGACATTTGGG |
| | GCCAGGGGACTCTTGTCACCGTGTCCTCGGCCTCCACTAAGGGCCCGTCAG |
| | TGTTCCCCCTTGCGCCATCCTCGAAGTCAACCTCCGGAGGAACTGCCGCAC |
| | TGGGTTGCCTCGTGAAAGACTATTTCCCGGAACCCGTCACTGTCTCCTGGA |
| | ACTCAGGAGCGCTCACCAGCGGAGTGCATACCTTTCCTGCGGTGCTGCAGT |
| | CCAGCGGCCTGTACTCCCTGAGCTCCGTCGTGACCGTCCCCTCGTCGTCCCT |
| | GGGAACCCAAACCTACATTTGCAACGTCAATCACAAGCCAAGCAACACTA |
| | AGGTGGACAAGAGAGTGGAGCCCAAGTCCTGCGATAAGACCCACACCTGT |
| | CCTCCCTGTCCGGCACCTGAACTGCTTGGTGGACCTTCCGTGTTCCTGTTCC |
| | CGCCCAAGCCAAAAGACACCCTGTATATCACTCGCGAACCGGAAGTCACTT |
| | GCGTGGTCGTGGACGTGTCCCACGAGGACCCCGAGGTCAAGTTTAATTGGT |
| | ACGTGGACGGAGTGGAAGTGCACAACGCCAAGACCAAGCCGCGGGAAGA |
| | ACAGTACAACTCCACCTACCGCGTGGTGTCCGTCCTGACTGTGCTCCACCA |
| | GGACTGGCTGAACGGAAAGGAGTACAAGTGCAAAGTGTCCAACAAGGCAC |
| | TGCCAGCCCCTATCGAAAAGACTATCTCCAAGGCCAAGGGCCAACCTAGG |
| | GAGCCCCAGGTGTACACGTTGCCTCCTTCCCGCGAAGAAATGACTAAGAAC |
| | CAGGTGTCGCTGACCTGTCTCGTGAAAGGGTTCTACCCCTCTGACATCGCC |
| | GTGGAATGGGAGTCAAACGGACAGCCTGAGAACAACTATAAGACCACACC |
| | ACCTGTCCTGGACTCCGACGGCTCCTTCTTCCTGTACTCAAAGTTGACCGTG |
| | GACAAGTCGCGGTGGCAACAGGGCAACGTGTTCTCTTGCTCCGTGATGCAC |
| | GAAGCCCTGCACAACCACTACACCCAAAAGTCGCTCAGCCTCTCCCCCGGA |
| | AAG (SEQ ID NO: 2659) |
| LCDR1 | RASQGISSDLN (SEQ ID NO: 2636) |
| (Combined) | |
| LCDR2 | AASNLQS (SEQ ID NO: 2637) |
| (Combined) | |
| LCDR3 | QQYTDESMT (SEQ ID NO: 2638) |
| (Combined) | |
| LCDR1 | RASQGISSDLN (SEQ ID NO: 2636) |
| (Kabat) | |
| LCDR2 | AASNLQS (SEQ ID NO: 2637) |
| (Kabat) | |
| LCDR3 | QQYTDESMT (SEQ ID NO: 2638) |
| (Kabat) | |
| LCDR1 | SQGISSD (SEQ ID NO: 2639) |
| (Chothia) | |
| LCDR2 | AAS (SEQ ID NO: 2640) |
| (Chothia) | |
| LCDR3 | YTDESM (SEQ ID NO: 2641) |
| (Chothia) | |
| LCDR1 | QGISSD (SEQ ID NO: 2642) |
| (IMGT) | |
| LCDR2 | AAS (SEQ ID NO: 2640) |
| (IMGT) | |
| LCDR3 | QQYTDESMT (SEQ ID NO: 2638) |
| (IMGT) | |
| VL | DIQMTQSPSSLSASVGDRVTITCRASQGISSDLNWYQQKPGKAPKLLIYAASNL |
| | QSGVPSRFSGSGSGTDFTLTISSLQPEDFATYYCQQYTDESMTFGQGTKVEIK |
| | (SEQ ID NO: 2643) |
| DNA VL | GACATTCAGATGACCCAGTCCCCGTCGTCCCTGTCCGCATCCGTGGGCGAC |
| | AGAGTCACCATCACTTGCCGGGCCTCACAGGGAATTTCCTCCGACCTGAAC |
| | TGGTATCAGCAGAAGCCTGGAAAGGCCCCGAAGCTGCTGATCTACGCCGC |
| | GTCCAACTTGCAATCGGGAGTGCCAAGCCGCTTTTCTGGTTCCGGGAGCGG |
| | GACTGACTTCACCCTGACTATTAGCAGCCTGCAGCCCGAAGATTTCGCTAC |
| | CTACTACTGCCAACAGTACACAGATGAATCCATGACCTTCGGACAGGGCAC |
| | CAAAGTCGAGATCAAG (SEQ ID NO: 2650) |
| Light Chain | DIQMTQSPSSLSASVGDRVTITCRASQGISSDLNWYQQKPGKAPKLLIYAASNL |
| | QSGVPSRFSGSGSGTDFTLTISSLQPEDFATYYCQQYTDESMTFGQGTKVEIKR |
| | TVAAPSVFIFPPSDEQLKSGTASVVCLLNNFYPREAKVQWKVDNALQSGNSQE |
| | SVTEQDSKDSTYSLSSTLTLSKADYEKHKVYACEVTHQGLSSPVTKSFNRGEC |
| | (SEQ ID NO: 2645) |
| DNA Light | GACATTCAGATGACCCAGTCCCCGTCGTCCCTGTCCGCATCCGTGGGCGAC |
| Chain | AGAGTCACCATCACTTGCCGGGCCTCACAGGGAATTTCCTCCGACCTGAAC |
| | TGGTATCAGCAGAAGCCTGGAAAGGCCCCGAAGCTGCTGATCTACGCCGC |
| | GTCCAACTTGCAATCGGGAGTGCCAAGCCGCTTTTCTGGTTCCGGGAGCGG |
| | GACTGACTTCACCCTGACTATTAGCAGCCTGCAGCCCGAAGATTTCGCTAC |
| | CTACTACTGCCAACAGTACACAGATGAATCCATGACCTTCGGACAGGGCAC |
| | CAAAGTCGAGATCAAGCGTACGGTGGCCGCTCCCAGCGTGTTCATCTTCCC |
| | CCCCAGCGACGAGCAGCTGAAGAGCGGCACCGCCAGCGTGGTGTGCCTGC |
| | TGAACAACTTCTACCCCCGGGAGGCCAAGGTGCAGTGGAAGGTGGACAAC |
| | GCCCTGCAGAGCGGCAACAGCCAGGAGAGCGTCACCGAGCAGGACAGCA |
| | AGGACTCCACCTACAGCCTGAGCAGCACCCTGACCCTGAGCAAGGCCGAC |
| | TACGAGAAGCATAAGGTGTACGCCTGCGAGGTGACCCACCAGGGCCTGTC |
| | CAGCCCCGTGACCAAGAGCTTCAACAGGGGCGAGTGC (SEQ ID NO: 2651) |

MOR042596

| | |
|---|---|
| HCDR1 | GYTFTGYHMS (SEQ ID NO: 2586) |
| (Combined) | |
| HCDR2 | VINPVSGNTVYAQKFQG (SEQ ID NO: 2587) |
| (Combined) | |
| HCDR3 | IPSYTYAFDY (SEQ ID NO: 2588) |
| (Combined) | |
| HCDR1 | GYHMS (SEQ ID NO: 2589) |
| (Kabat) | |
| HCDR2 | VINPVSGNTVYAQKFQG (SEQ ID NO: 2587) |
| (Kabat) | |
| HCDR3 | IPSYTYAFDY (SEQ ID NO: 2588) |
| (Kabat) | |
| HCDR1 | GYTFTGY (SEQ ID NO: 2590) |
| (Chothia) | |
| HCDR2 | NPVSGN (SEQ ID NO: 2591) |
| (Chothia) | |
| HCDR3 | IPSYTYAFDY (SEQ ID NO: 2588) |
| (Chothia) | |
| HCDR1 | GYTFTGYH (SEQ ID NO: 2592) |
| (IMGT) | |
| HCDR2 | INPVSGNT (SEQ ID NO: 2593) |
| (IMGT) | |
| HCDR3 | ARIPSYTYAFDY (SEQ ID NO: 2594) |
| (IMGT) | |
| VH | QVQLVQSGAEVKKPGASVKVSCKASGYTFTGYHMSWVRQAPGQGLEWMGV |
| | INPVSGNTVYAQKFQGRVTMTRDTSISTAYMELSRLRSEDTAVYYCARIPSYT |
| | YAFDYWGQGTLVTVSS (SEQ ID NO: 2595) |
| DNA VH | CAGGTGCAATTGGTGCAGAGCGGTGCGGAAGTGAAAAAACCGGGTGCCAG |
| | CGTGAAAGTTAGCTGCAAAGCGTCCGGATATACCTTCACTGGTTACCATAT |
| | GTCTTGGGTGCGCCAGGCCCCGGGCCAGGGCCTCGAGTGGATGGGCGTTAT |
| | CAACCCGGTTTCTGGCAACACGGTTTACGCGCAGAAATTTCAGGGCCGGGT |
| | GACCATGACCCGTGATACCAGCATTAGCACCGCGTATATGGAACTGAGCC |
| | GTCTGCGTAGCGAAGATACGGCCGTGTATTATTGCGCGCGTATCCCGTCTT |
| | ACACTTACGCTTTCGATTACTGGGGCCAAGGCACCCTGGTGACTGTTAGCT |
| | CA (SEQ ID NO: 2596) |
| Heavy Chain | QVQLVQSGAEVKKPGASVKVSCKASGYTFTGYHMSWVRQAPGQGLEWMGV |
| | INPVSGNTVYAQKFQGRVTMTRDTSISTAYMELSRLRSEDTAVYYCARIPSYT |
| | YAFDYWGQGTLVTVSSASTKGPSVFPLAPSSKSTSGGTAALGCLVKDYFPEPV |
| | TVSWNSGALTSGVHTFPAVLQSSGLYSLSSVVTVPSSSLGTQTYICNVNHKPSN |
| | TKVDKRVEPKSCDKTHTCPPCPAPEAAGGPSVFLFPPKPKDTLMISRTPEVTCV |
| | VVDVSHEDPEVKFNWYVDGVEVHNAKTKPREEQYNSTYRVVSVLTVLHQD |
| | WLNGKEYKCKVSNKALPAPIEKTISKAKGQPREPQVYTLPPSREEMTKNQVSL |
| | TCLVKGFYPSDIAVEWESNGQPENNYKTTPPVLDSDGSFFLYSKLTVDKSRWQ |
| | QGNVFSCSVMHEALHNHYTQKSLSLSPGK (SEQ ID NO: 2597) |
| DNA Heavy | CAGGTGCAATTGGTGCAGAGCGGTGCGGAAGTGAAAAAACCGGGTGCCAG |
| Chain | CGTGAAAGTTAGCTGCAAAGCGTCCGGATATACCTTCACTGGTTACCATAT |
| | GTCTTGGGTGCGCCAGGCCCCGGGCCAGGGCCTCGAGTGGATGGGCGTTAT |
| | CAACCCGGTTTCTGGCAACACGGTTTACGCGCAGAAATTTCAGGGCCGGGT |
| | GACCATGACCCGTGATACCAGCATTAGCACCGCGTATATGGAACTGAGCC |
| | GTCTGCGTAGCGAAGATACGGCCGTGTATTATTGCGCGCGTATCCCGTCTT |
| | ACACTTACGCTTTCGATTACTGGGGCCAAGGCACCCTGGTGACTGTTAGCT |
| | CAGCCTCCACCAAGGGTCCATCGGTCTTCCCCCTGGCACCCTCCTCCAAGA |
| | GCACCTCTGGGGGCACAGCGGCCCTGGGCTGCCTGGTCAAGGACTACTTCC |
| | CCGAACCGGTGACGGTGTCGTGGAACTCAGGCGCCCTGACCAGCGGCGTG |
| | CACACCTTCCCGGCTGTCCTACAGTCCTCAGGACTCTACTCCCTCAGCAGC |
| | GTGGTGACCGTGCCCTCCAGCAGCTTGGGCACCCAGACCTACATCTGCAAC |
| | GTGAATCACAAGCCCAGCAACACCAAGGTGGACAAGAGAGTTGAGCCCAA |
| | ATCTTGTGACAAAACTCACACATGCCCACCGTGCCCAGCACCTGAAGCAGC |
| | GGGGGGACCGTCAGTCTTCCTCTTCCCCCCAAAACCCAAGGACACCCTCAT |
| | GATCTCCCGGACCCCTGAGGTCACATGCGTGGTGGTGGACGTGAGCCACG |
| | AAGACCCTGAGGTCAAGTTCAACTGGTACGTGGACGGCGTGGAGGTGCAT |
| | AATGCCAAGACAAAGCCGCGGGAGGAGCAGTACAACAGCACGTACCGGGT |
| | GGTCAGCGTCCTCACCGTCCTGCACCAGGACTGGCTGAATGGCAAGGAGT |
| | ACAAGTGCAAGGTCTCCAACAAAGCCCTCCCAGCCCCCATCGAGAAAACC |
| | ATCTCCAAAGCCAAAGGGCAGCCCCGAGAACCACAGGTGTACACCCTGCC |
| | CCCATCCCGGGAGGAGATGACCAAGAACCAGGTCAGCCTGACCTGCCTGG |
| | TCAAAGGCTTCTATCCCAGCGACATCGCCGTGGAGTGGGAGAGCAATGGG |
| | CAGCCGGAGAACAACTACAAGACCACGCCTCCCGTGCTGGACTCCGACGG |
| | CTCCTTCTTCCTCTACAGCAAGCTCACCGTGGACAAGAGCAGGTGGCAGCA |
| | GGGGAACGTCTTCTCATGCTCCGTGATGCATGAGGCTCTGCACAACCACTA |
| | CACGCAGAAGAGCCTCTCCCTGTCTCCGGGTAAA (SEQ ID NO: 2598) |
| LCDR1 | RASQDISNYLA (SEQ ID NO: 2599) |
| (Combined) | |
| LCDR2 | RASSLQS (SEQ ID NO: 2600) |
| (Combined) | |
| LCDR3 | QQHGHSPTT (SEQ ID NO: 2660) |
| (Combined) | |
| LCDR1 | RASQDISNYLA (SEQ ID NO: 2599) |
| (Kabat) | |
| LCDR2 | RASSLQS (SEQ ID NO: 2600) |
| (Kabat) | |
| LCDR3 | QQHGHSPTT (SEQ ID NO: 2660) |
| (Kabat) | |
| LCDR1 | SQDISNY (SEQ ID NO: 2602) |
| (Chothia) | |
| LCDR2 | RAS (SEQ ID NO: 2603) |
| (Chothia) | |
| LCDR3 | HGHSPT (SEQ ID NO: 2661) |
| (Chothia) | |
| LCDR1 | QDISNY (SEQ ID NO: 2605) |
| (IMGT) | |
| LCDR2 | RAS (SEQ ID NO: 2603) |
| (IMGT) | |
| LCDR3 | QQHGHSPTT (SEQ ID NO: 2660) |
| (IMGT) | |
| VL | DIQMTQSPSSLSASVGDRVTITCRASQDISNYLAWYQQKPGKAPKLLIYRASSL |
| | QSGVPSRFSGSGSGTDFTLTISSLQPEDFATYYCQQHGHSPTTFGQGTKVEIK |
| | (SEQ ID NO: 2662) |
| DNA VL | GATATCCAGATGACCCAGAGCCCGAGCAGCCTGAGCGCCAGCGTGGGCGA |
| | TCGCGTGACCATTACCTGCAGAGCCAGCCAGGACATTTCTAACTACCTGGC |
| | TTGGTACCAGCAGAAACCGGGCAAAGCGCCGAAACTATTAATCTACCGTG |
| | CTTCTTCTCTGCAAAGCGGCGTGCCGAGCCGCTTTAGCGGCAGCGGATCCG |
| | GCACCGATTTCACCCTGACCATTAGCTCTCTGCAACCGGAAGACTTTGCGA |
| | CCTATTATTGCCAGCAGCATGGTCATTCTCCGACTACCTTTGGCCAGGGCA |
| | CGAAAGTTGAAATTAAA (SEQ ID NO: 2663) |
| Light Chain | DIQMTQSPSSLSASVGDRVTITCRASQDISNYLAWYQQKPGKAPKLLIYRASSL |
| | QSGVPSRFSGSGSGTDFTLTISSLQPEDFATYYCQQHGHSPTTFGQGTKVEIKRT |
| | VAAPSVFIFPPSDEQLKSGTASVVCLLNNFYPREAKVQWKVDNALQSGNSQES |
| | VTEQDSKDSTYSLSSTLTLSKADYEKHKVYACEVTHQGLSSPVTKSFNRGEC |
| | (SEQ ID NO: 2664) |
| DNA Light | GATATCCAGATGACCCAGAGCCCGAGCAGCCTGAGCGCCAGCGTGGGCGA |
| Chain | TCGCGTGACCATTACCTGCAGAGCCAGCCAGGACATTTCTAACTACCTGGC |
| | TTGGTACCAGCAGAAACCGGGCAAAGCGCCGAAACTATTAATCTACCGTG |
| | CTTCTTCTCTGCAAAGCGGCGTGCCGAGCCGCTTTAGCGGCAGCGGATCCG |
| | GCACCGATTTCACCCTGACCATTAGCTCTCTGCAACCGGAAGACTTTGCGA |
| | CCTATTATTGCCAGCAGCATGGTCATTCTCCGACTACCTTTGGCCAGGGCA |
| | CGAAAGTTGAAATTAAACGTACGGTGGCCGCTCCCAGCGTGTTCATCTTCC |
| | CCCCCAGCGACGAGCAGCTGAAGAGCGGCACCGCCAGCGTGGTGTGCCTG |
| | CTGAACAACTTCTACCCCCGGGAGGCCAAGGTGCAGTGGAAGGTGGACAA |
| | CGCCCTGCAGAGCGGCAACAGCCAGGAAAGCGTCACCGAGCAGGACAGCA |
| | AGGACTCCACCTACAGCCTGAGCAGCACCCTGACCCTGAGCAAGGCCGAC |
| | TACGAGAAGCACAAGGTGTACGCCTGCGAGGTGACCCACCAGGGCCTGTC |
| | CAGCCCCGTGACCAAGAGCTTCAACCGGGGCGAGTGT (SEQ ID NO: 2665) |

MOR041877

| | |
|---|---|
| HCDR1 | GFSLSTSGVGVS (SEQ ID NO: 2666) |
| (Combined) | |
| HCDR2 | LIFSDHDKIYSTSLKT (SEQ ID NO: 2667) |
| (Combined) | |
| HCDR3 | TLIDRSVYFDY (SEQ ID NO: 2668) |
| (Combined) | |
| HCDR1 | TSGVGVS (SEQ ID NO: 2669) |
| (Kabat) | |
| HCDR2 | LIFSDHDKIYSTSLKT (SEQ ID NO: 2667) |
| (Kabat) | |
| HCDR3 | TLIDRSVYFDY (SEQ ID NO: 2668) |
| (Kabat) | |
| HCDR1 | GFSLSTSGV (SEQ ID NO: 2670) |
| (Chothia) | |
| HCDR2 | FSDHD (SEQ ID NO: 2671) |
| (Chothia) | |
| HCDR3 | TLIDRSVYFDY (SEQ ID NO: 2668) |
| (Chothia) | |
| HCDR1 | GFSLSTSGVG (SEQ ID NO: 2672) |
| (IMGT) | |
| HCDR2 | IFSDHDK (SEQ ID NO: 2673) |
| (IMGT) | |
| HCDR3 | ARTLIDRSVYFDY (SEQ ID NO: 2674) |
| (IMGT) | |
| VH | QVQLKESGPALVKPTQTLTLTCTF SGF SLSTSGVGVSWIRQPPGKALEWLALIF |
| | SDHDKIYSTSLKTRLTISKDTSKNQVVLTMTNMDPVDTATYYCARTLIDRSVY |
| | FDYWGQGTLVTVSS (SEQ ID NO: 2675) |
| DNA VH | CAGGTGCAATTGAAAGAAAGCGGTCCGGCGCTGGTGAAACCGACCCAGAC |
| | CCTGACCCTGACGTGCACCTTTTCCGGATTCAGCCTGTCTACTTCCGGTGTT |
| | GGTGTGAGCTGGATTCGCCAGCCGCCGGGCAAAGCGCTCGAGTGGCTGGC |
| | GCTGATCTTCTCTGACCATGACAAGATCTATAGCACCAGCCTGAAAACCCG |
| | TCTGACCATTAGCAAAGATACTTCGAAAAACCAGGTGGTGCTGACCATGAC |
| | CAACATGGACCCGGTGGATACCGCGACCTATTATTGCGCGCGTACTCTGAT |
| | CGACCGTTCTGTTTACTTCGATTACTGGGGCCAAGGCACCCTGGTGACTGTT |
| | AGCTCA (SEQ ID NO: 2676) |
| Heavy Chain | QVQLKESGPALVKPTQ TLTLTCTF SGF SLSTSGVGVSWIRQPPGKALEWLALIF |
| | SDHDKIYSTSLKTRLTISKDTSKNQVVLTMTNMDPVDTATYYCARTLIDRSVY |
| | FDYWGQGTLVTVSSASTKGPSVFPLAPSSKSTSGGTAALGCLVKDYFPEPVTV |
| | SWNSGALTSGVHTFPAVLQSSGLYSLSSVVTVPSSSLGTQTYICNVNHKPSNTK |
| | VDKRVEPKSCDKTHTCPPCPAPEAAGGPSVFLFPPKPKDTLMISRTPEVTCVVV |
| | DVSHEDPEVKFNWYVDGVEVHNAKTKPREEQYNSTYRVVSVLTVLHQDWLN |
| | GKEYKCKVSNKALPAPIEKTISKAKGQPREPQVYTLPPSREEMTKNQVSLTCL |
| | VKGFYPSDIAVEWESNGQPENNYKTTPPVLDSDGSFFLYSKLTVDKSRWQQG |
| | NVFSCSVMHEALHNHYTQKSLSLSPGK (SEQ ID NO: 2677) |
| DNA Heavy | CAGGTGCAATTGAAAGAAAGCGGTCCGGCGCTGGTGAAACCGACCCAGAC |
| Chain | CCTGACCCTGACGTGCACCTTTTCCGGATTCAGCCTGTCTACTTCCGGTGTT |
| | GGTGTGAGCTGGATTCGCCAGCCGCCGGGCAAAGCGCTCGAGTGGCTGGC |
| | GCTGATCTTCTCTGACCATGACAAGATCTATAGCACCAGCCTGAAAACCCG |
| | TCTGACCATTAGCAAAGATACTTCGAAAAACCAGGTGGTGCTGACCATGAC |
| | CAACATGGACCCGGTGGATACCGCGACCTATTATTGCGCGCGTACTCTGAT |
| | CGACCGTTCTGTTTACTTCGATTACTGGGGCCAAGGCACCCTGGTGACTGTT |
| | AGCTCAGCCTCCACCAAGGGTCCATCGGTCTTCCCCCTGGCACCCTCCTCC |
| | AAGAGCACCTCTGGGGGCACAGCGGCCCTGGGCTGCCTGGTCAAGGACTA |
| | CTTCCCCGAACCGGTGACGGTGTCGTGGAACTCAGGCGCCCTGACCAGCGG |
| | CGTGCACACCTTCCCGGCTGTCCTACAGTCCTCAGGACTCTACTCCCTCAGC |
| | AGCGTGGTGACCGTGCCCTCCAGCAGCTTGGGCACCCAGACCTACATCTGC |
| | AACGTGAATCACAAGCCCAGCAACACCAAGGTGGACAAGAGAGTTGAGCC |
| | CAAATCTTGTGACAAAACTCACACATGCCCACCGTGCCCAGCACCTGAAGC |
| | AGCGGGGGGACCGTCAGTCTTCCTCTTCCCCCCAAAACCCAAGGACACCCT |
| | CATGATCTCCCGGACCCCTGAGGTCACATGCGTGGTGGTGGACGTGAGCCA |
| | CGAAGACCCTGAGGTCAAGTTCAACTGGTACGTGGACGGCGTGGAGGTGC |
| | ATAATGCCAAGACAAAGCCGCGGGAGGAGCAGTACAACAGCACGTACCGG |
| | GTGGTCAGCGTCCTCACCGTCCTGCACCAGGACTGGCTGAATGGCAAGGA |
| | GTACAAGTGCAAGGTCTCCAACAAAGCCCTCCCAGCCCCCATCGAGAAAA |
| | CCATCTCCAAAGCCAAAGGGCAGCCCCGAGAACCACAGGTGTACACCCTG |
| | CCCCCATCCCGGGAGGAGATGACCAAGAACCAGGTCAGCCTGACCTGCCT |
| | GGTCAAAGGCTTCTATCCCAGCGACATCGCCGTGGAGTGGGAGAGCAATG |
| | GGCAGCCGGAGAACAACTACAAGACCACGCCTCCCGTGCTGGACTCCGAC |
| | GGCTCCTTCTTCCTCTACAGCAAGCTCACCGTGGACAAGAGCAGGTGGCAG |
| | CAGGGGAACGTCTTCTCATGCTCCGTGATGCATGAGGCTCTGCACAACCAC |
| | TACACGCAGAAGAGCCTCTCCCTGTCTCCGGGTAAA (SEQ ID NO: 2678) |
| LCDR1 | SGSSSNIGHHYVS (SEQ ID NO: 2679) |
| (Combined) | |
| LCDR2 | DNTNRPS (SEQ ID NO: 2680) |
| (Combined) | |
| LCDR3 | ATWDGLMNSIV (SEQ ID NO: 2681) |
| (Combined) | |
| LCDR1 | SGSSSNIGHHYVS (SEQ ID NO: 2679) |
| (Kabat) | |
| LCDR2 | DNTNRPS (SEQ ID NO: 2680) |
| (Kabat) | |
| LCDR3 | ATWDGLMNSIV (SEQ ID NO: 2681) |
| (Kabat) | |
| LCDR1 | SSSNIGHHY (SEQ ID NO: 2682) |
| (Chothia) | |
| LCDR2 | DNT (SEQ ID NO: 2683) |
| (Chothia) | |
| LCDR3 | WDGLMNSI (SEQ ID NO: 2684) |
| (Chothia) | |
| LCDR1 | SSNIGHHY (SEQ ID NO: 2685) |
| (IMGT) | |
| LCDR2 | DNT (SEQ ID NO: 2683) |
| (IMGT) | |
| LCDR3 | ATWDGLMNSIV (SEQ ID NO: 2681) |
| (IMGT) | |
| VL | DIVLTQPPSVSGAPGQRVTISCSGSSSNIGHHYVSWYQQLPGTAPKLLIYDNTN |
| | RPSGVPDRFSGSKSGTSASLAITGLQAEDEADYYCATWDGLMNSIVFGGGTKL |
| | TVL (SEQ ID NO: 2686) |
| DNA VL | GATATCGTGCTGACCCAGCCGCCGAGCGTGAGCGGTGCACCGGGCCAGCG |
| | CGTGACCATTAGCTGTAGCGGCAGCAGCAGCAACATTGGTCATCATTACGT |
| | GTCTTGGTACCAGCAGCTGCCGGGCACGGCGCCGAAACTGCTGATCTACGA |
| | CAACACTAACCGCCCGAGCGGCGTGCCGGATCGCTTTAGCGGATCCAAAA |
| | GCGGCACCAGCGCCAGCCTGGCGATTACCGGCCTGCAAGCAGAAGACGAA |
| | GCGGATTATTACTGCGCTACTTGGGACGGTCTGATGAACTCTATCGTGTTTG |
| | GCGGCGGCACGAAGTTAACCGTCCTA (SEQ ID NO: 2687) |
| Light Chain | DIVLTQPPSVSGAPGQRVTISCSGSSSNIGHHYVSWYQQLPGTAPKLLIYDNTN |
| | RPSGVPDRFSGSKSGTSASLAITGLQAEDEADYYCATWDGLMNSIVFGGGTKL |
| | TVLGQPKAAPSVTLFPPSSEELQANKATLVCLISDFYPGAVTVAWKADSSPVK |
| | AGVETTTPSKQSNNKYAASSYLSLTPEQWKSHRSYSCQVTHEGSTVEKTVAPT |
| | ECS (SEQ ID NO: 2688) |
| DNA Light | GATATCGTGCTGACCCAGCCGCCGAGCGTGAGCGGTGCACCGGGCCAGCG |
| Chain | CGTGACCATTAGCTGTAGCGGCAGCAGCAGCAACATTGGTCATCATTACGT |
| | GTCTTGGTACCAGCAGCTGCCGGGCACGGCGCCGAAACTGCTGATCTACGA |
| | CAACACTAACCGCCCGAGCGGCGTGCCGGATCGCTTTAGCGGATCCAAAA |
| | GCGGCACCAGCGCCAGCCTGGCGATTACCGGCCTGCAAGCAGAAGACGAA |
| | GCGGATTATTACTGCGCTACTTGGGACGGTCTGATGAACTCTATCGTGTTTG |
| | GCGGCGGCACGAAGTTAACCGTCCTAGGTCAGCCCAAGGCTGCCCCCTCG |
| | GTCACTCTGTTCCCGCCCTCCTCTGAGGAGCTTCAAGCCAACAAGGCCACA |
| | CTGGTGTGTCTCATAAGTGACTTCTACCCGGGAGCCGTGACAGTGGCCTGG |
| | AAGGCAGATAGCAGCCCCGTCAAGGCGGGAGTGGAGACCACCACACCCTC |
| | CAAACAAAGCAACAACAAGTACGCGGCCAGCAGCTATCTGAGCCTGACGC |
| | CTGAGCAGTGGAAGTCCCACAGAAGCTACAGCTGCCAGGTCACGCATGAA |
| | GGGAGCACCGTGGAGAAGACAGTGGCCCCTACAGAATGTTCA |
| | (SEQ ID NO: 2689) |

[0540] In some embodiments, each of the light chain variable regions and each of the heavy chain variable regions disclosed above, including those in TABLE J1 above, may be attached to the light chain constant regions (TABLE EN1) and heavy chain constant regions (TABLE EN2) to form complete antibody light and heavy chains, respectively, as further discussed below. Further, each of the generated heavy and light chain sequences may be combined to form a complete antibody structure. It should be understood that the heavy chain and light chain variable regions provided herein can also be attached to other constant domains having different sequences than the exemplary sequences listed herein.

K. KR Patent Application Publication No. KR20200048069A

[0541] In some embodiments, the TREM2 agonist is an antibody, or an antigen-binding fragment thereof, as described in KR Patent Application Publication No. KR20200048069A, which is incorporated by reference herein, in its entirety.

[0542] In some embodiments, the TREM2 antibody comprises the CDR L1, CDR L2 and CDR L3 in the light chain variable region of the antibody produced by hybridoma cells with accession number KCTC 13471BP or hybridoma cells with accession number KTC 13470BP.

[0543] In some embodiments, the TREM2 antibody comprises the CDR H1, CDR H2 and CDR H3 in the heavy chain variable region of the antibody produced by hybridoma cells with accession number KCTC 13471BP or hybridoma cells with accession number KTC 13470BP.

[0544] In some embodiments, the TREM2 antibody comprises the CDR L1, CDR L2 and CDR L3 in the light chain variable region and the CDR H1, CDR H2 and CDR H3 in the heavy chain variable region of the antibody produced by hybridoma cells with accession number KCTC 13471BP or hybridoma cells with accession number KTC 13470BP.

[0545] In some embodiments, the TREM2 antibody comprises the light chain variable region and the heavy chain variable region of the antibody produced by hybridoma cells with accession number KCTC 13471BP or hybridoma cells with accession number KTC 13470BP.

[0546] In some embodiments, the TREM2 agonist is an antibody produced by hybridoma cells with accession number KCTC 13471BP or hybridoma cells with accession number KTC 13470BP.

[0547] In some embodiments, the light chain variable regions and the heavy chain variable regions describe above for the antibody produced by hybridoma cells with accession number KCTC 13471BP or hybridoma cells with accession number KTC 13470BP may be attached to the light chain constant regions (TABLE EN1) and heavy chain constant regions (TABLE EN2) to form complete antibody light and heavy chains, respectively, as further discussed below. Further, each of the generated heavy and light chain sequences may be combined to form a complete antibody structure. It should be understood that the heavy chain and light chain variable regions provided herein can also be attached to other constant domains having different sequences than the exemplary sequences listed herein.

L. PCT Patent Application Publication No. WO2020/172450A1

[0548] In some embodiments, the TREM2 agonist is an antibody, or an antigen-binding fragment thereof, as described in PCT Patent Application Publication No. WO2020/172450A1 (“the '450 application”), which is incorporated by reference herein, in its entirety.

[0549] In some embodiments, the antibody or antigen-binding fragment thereof comprises:
[0550] (a) a CDR-H1 sequence comprising the sequence of GFSIEDFYIH (SEQ ID NO:2717);
[0551] (b) a CDR-H2 sequence comprising the sequence of W-I-D-P-E-β₆-G-β₈-S-K-Y-A-P-K-F-Q-G (SEQ ID NO:2735), wherein β₆ is N or Q and β₈ is D or E;
[0552] (c) a CDR-H3 sequence comprising the sequence of HADHGNYGSTMDY (SEQ ID NO:2719);
[0553] (d) CDR-L1 sequence comprising the sequence of HASQHINVWLS (SEQ ID NO:2720);
[0554] (e) a CDR-L2 sequence comprising the sequence of KASNLHT (SEQ ID NO:2721); and
[0555] (f) a CDR-L3 sequence comprising the sequence of QQGQTYPRT (SEQ ID NO: 2722).

[0556] In some embodiments, the CDR-H2 sequence is selected from SEQ ID NOS:2718, 2727, 2729, and 2731.

[0557] In some embodiments, the antibody or antigen-binding fragment comprises:
[0558] (a) a CDR-H1 comprising the amino acid sequence of SEQ ID NO:2717, a CDR-H2 comprising the amino acid sequence of SEQ ID NO:2718, a CDR-H3 comprising the amino acid sequence of SEQ ID NO:2719, a CDR-L1 comprising the amino acid sequence of SEQ ID NO:2720, a CDR-L2 comprising the amino acid sequence of SEQ ID NO:2721, and a CDR-L3 comprising the amino acid sequence of SEQ ID NO:2722; or
[0559] (b) a CDR-H1 comprising the amino acid sequence of SEQ ID NO:2717, a CDR-H2 comprising the amino acid sequence of SEQ ID NO:2727, a CDR-H3 comprising the amino acid sequence of SEQ ID NO:2719, a CDR-L1 comprising the amino acid sequence of SEQ ID NO:2720, a CDR-L2 comprising the amino acid sequence of SEQ ID NO:2721, and a CDR-L3 comprising the amino acid sequence of SEQ ID NO:2722; or
[0560] (c) a CDR-H1 comprising the amino acid sequence of SEQ ID NO:2717, a CDR-H2 comprising the amino acid sequence of SEQ ID NO:2729, a CDR-H3 comprising the amino acid sequence of SEQ ID NO:2719, a CDR-L1 comprising the amino acid sequence of SEQ ID NO:2720, a CDR-L2 comprising the amino acid sequence of SEQ ID NO:2721, and a CDR-L3 comprising the amino acid sequence of SEQ ID NO:2722; or
[0561] (d) a CDR-H1 comprising the amino acid sequence of SEQ ID NO:2717, a CDR-H2 comprising the amino acid sequence of SEQ ID NO:2731, a CDR-H3 comprising the amino acid sequence of SEQ ID NO:2719, a CDR-L1 comprising the amino acid sequence of SEQ ID NO:2720, a CDR-L2 comprising the amino acid sequence of SEQ ID NO:2721, and a CDR-L3 comprising the amino acid sequence of SEQ ID NO:2722.

[0562] In some embodiments, the antibody or antigen-binding fragment comprises a V H sequence that has at least 85% sequence identity to any one of SEQ ID NOS:2715, 2723, 2725, 2726, 2728, 2730, 2732, 2733, and 2734. In some embodiments, the V H sequence has at least 90% sequence identity to SEQ ID NO:2715. In some embodiments, the V_{H} sequence has at least 95% sequence identity to SEQ ID NO:2715. In some embodiments, the VH sequence comprises SEQ ID NO:2715. In some embodiments, the V_{H} sequence has at least 90% sequence identity to SEQ ID NO:2730. In some embodiments, the V_{H} sequence has at least 95% sequence identity to SEQ ID NO:2730. In some embodiments, the V_{H} sequence comprises SEQ ID NO:2730. In some embodiments, the V_{H} sequence has at least 90% sequence identity to SEQ ID NO:2733. In some embodiments, the V_{H} sequence has at least 95% sequence identity to SEQ ID NO:2733. In some embodiments, the V_{H} sequence comprises SEQ ID NO:2733.

[0563] In some embodiments, the antibody or antigen-binding fragment comprises a V_{L} sequence that has at least 85% sequence identity to SEQ ID NO:2716 or SEQ ID NO:2724. In some embodiments, the V_{L} sequence has at least 90% sequence identity to SEQ ID NO:2716. In some embodiments, the V_{L}sequence has at least 95% sequence identity to SEQ ID NO:2716. In some embodiments, the V_{L}sequence comprises SEQ ID NO:2716. In some embodiments, the V_{L} sequence has at least 90% sequence identity to SEQ ID NO:2724. In some embodiments, the V_{L} sequence has at least 95% sequence identity to SEQ ID NO:2724. In some embodiments, the V_{L} sequence comprises SEQ ID NO:2724.

[0564] In some embodiments, the antibody or antigen-binding fragment comprises:
[0565] (a) a VH sequence comprising SEQ ID NO:2715 and a V_{L} sequence comprising SEQ ID NO:2716; or
[0566] (b) a VH sequence comprising SEQ ID NO:2723 and a V_{L} sequence comprising SEQ ID NO:2724; or
[0567] (c) a VH sequence comprising SEQ ID NO:2725 and a V_{L} sequence comprising SEQ ID NO:2724; or
[0568] (d) a VH sequence comprising SEQ ID NO:2726 and a V_{L} sequence comprising SEQ ID NO:2724; or
[0569] (e) a VH sequence comprising SEQ ID NO:2728 and a V_{L} sequence comprising SEQ ID NO:2724; or
[0570] (f) a VH sequence comprising SEQ ID NO:2730 and a V_{L} sequence comprising SEQ ID NO:2724; or
[0571] (g) a VH sequence comprising SEQ ID NO:2732 and a V_{L} sequence comprising SEQ ID NO:2724; or
[0572] (h) a VH sequence comprising SEQ ID NO:2733 and a VL sequence comprising SEQ ID NO:2724; or
[0573] (i) a VH sequence comprising SEQ ID NO:2734 and a VL sequence comprising SEQ ID NO:2724.

[0574] In some embodiments, an antibody or antigen-binding fragment thereof that specifically binds to TREM2 comprises:
[0575] (a) a CDR-H1 sequence comprising the sequence of G-F-T-F-T-α₆-F-Y-M-S(SEQ ID NO:2736), wherein a₆ is D or N;
[0576] (b) a CDR-H2 sequence comprising the sequence of V-I-R-N-β₅-β₆-N-β₈-Y-T-β₁₁-β₁₂-Y-N-P-S-V-K-G (SEQ ID NO:2737), wherein β₅ is K or R; β₆ is A or P; β₈ is G or A; β₁₁ is A or T; and β₁₂ is G or D;
[0577] (c) a CDR-H3 sequence comprising the sequence of γ₁-R-L-γ₄-Y-G-F-D-Y (SEQ ID NO:2738), wherein γ₁ is A or T; and γ4 is T or S;
[0578] (d) a CDR-L1 sequence comprising the sequence of Q-S-S-K-S-L-L-H-S-δτo-G-K-T-Y-L-N (SEQ ID NO:2739), wherein &to is N or T; a CDR-L2 sequence comprising the sequence of WMSTRAS (SEQ ID NO: 2696); and
[0579] (e) a CDR-L3 sequence comprising the sequence of Q-Q-F-L-E-ϕ₆-P-F-T (SEQ ID NO:2740), wherein ϕ₆ is Y or F.

[0580] In some embodiments, the CDR-H1 sequence is selected from any one of SEQ ID NOS:2692 and 2700. In some embodiments, the CDR-H2 sequence is selected from any one of SEQ ID NOS:2693, 2701, and 2713. In some embodiments, the CDR-H3 sequence is selected from any one of SEQ ID NOS:2694, 2702, and 2705. In some embodiments, the CDR-L1 sequence is selected from any one of SEQ ID NOS:2695 and 2711. In some embodiments, the CDR-L3 sequence is selected from any one of SEQ ID NOS:2697 and 2706.

[0581] In some embodiments, the antibody or antigen-binding fragment comprises:
[0582] (a) a CDR-H1 comprising the amino acid sequence of SEQ ID NO:2692, a CDR-H2 comprising the amino acid sequence of SEQ ID NO:2693, a CDR-H3 comprising the amino acid sequence of SEQ ID NO:2705, a CDR-L1 comprising the amino acid sequence of SEQ ID NO:2695, a CDR-L2 comprising the amino acid sequence of SEQ ID NO:2696, and a CDR-L3 comprising the amino acid sequence of SEQ ID NO:2706; or
[0583] (b) a CDR-H1 comprising the amino acid sequence of SEQ ID NO:2692, a CDR-H2 comprising the amino acid sequence of SEQ ID NO:2693, a CDR-H3 comprising the amino acid sequence of SEQ ID NO:2705, a CDR-L1 comprising the amino acid sequence of SEQ ID NO:2711, a CDR-L2 comprising the amino acid sequence of SEQ ID NO:2696, and a CDR-L3 comprising the amino acid sequence of SEQ ID NO:2706; or
[0584] (c) a CDR-H1 comprising the amino acid sequence of SEQ ID NO:2692, a CDR-H2 comprising the amino acid sequence of SEQ ID NO:2713, a CDR-H3 comprising the amino acid sequence of SEQ ID NO:2705, a CDR-L1 comprising the amino acid sequence of SEQ ID NO:2695, a CDR-L2 comprising the amino acid sequence of SEQ ID NO:2696, and a CDR-L3 comprising the amino acid sequence of SEQ ID NO:2706; or
[0585] (d) a CDR-H1 comprising the amino acid sequence of SEQ ID NO:2692, a CDR-H2 comprising the amino acid sequence of SEQ ID NO:2713, a CDR-H3 comprising the amino acid sequence of SEQ ID NO:2705, a CDR-L1 comprising the amino acid sequence of SEQ ID NO:2711, a CDR-L2 comprising the amino acid sequence of SEQ ID NO:2696, and a CDR-L3 comprising the amino acid sequence of SEQ ID NO:2706; or
[0586] (e) a CDR-H1 comprising the amino acid sequence of SEQ ID NO:2692, a CDR-H2 comprising the amino acid sequence of SEQ ID NO:2693, a CDR-H3 comprising the amino acid sequence of SEQ ID NO:2694, a CDR-L1 comprising the amino acid sequence of SEQ ID NO:2695, a CDR-L2 comprising the amino acid sequence of SEQ ID NO:2696, and a CDR-L3 comprising the amino acid sequence of SEQ ID NO:2697; or
[0587] (f) a CDR-H1 comprising the amino acid sequence of SEQ ID NO:2700, a CDR-H2 comprising the amino acid sequence of SEQ ID NO:2701, a CDR-H3 comprising the amino acid sequence of SEQ ID NO:2702, a CDR-L1 comprising the amino acid sequence of SEQ ID NO:2695, a CDR-L2 comprising the amino acid sequence of SEQ ID NO:2696, and a CDR-L3 comprising the amino acid sequence of SEQ ID NO:2697; or
[0588] (g) a CDR-H1 comprising the amino acid sequence of SEQ ID NO:2692, a CDR-H2 comprising the amino acid sequence of SEQ ID NO:2713, a CDR-H3 comprising the amino acid sequence of SEQ ID NO:2705, a CDR-L1 comprising the amino acid sequence of SEQ ID NO:2695, a CDR-L2 comprising the amino acid sequence of SEQ ID NO:2696, and a CDR-L3 comprising the amino acid sequence of SEQ ID NO:2697.

[0589] In some embodiments, the antibody or antigen-binding fragment comprises a VH sequence that has at least 85% sequence identity to any one of SEQ ID NOS:2690, 2698, 2703, 2708, 2709, 2712, 2714, and 2752. In some embodiments, the VH sequence has at least 90% sequence identity to SEQ ID NO:2703. In some embodiments, the VH sequence has at least 95% sequence identity to SEQ ID NO:2703. In some embodiments, the VH sequence comprises SEQ ID NO:2703. In some embodiments, the VH sequence has at least 90% sequence identity to SEQ ID NO:2712. In some embodiments, the VH sequence has at least 95% sequence identity to SEQ ID NO:2712. In some embodiments, the VH sequence comprises SEQ ID NO:2712. In some embodiments, the VH sequence has at least 90% sequence identity to SEQ ID NO:79. In some embodiments, the VH sequence has at least 95% sequence identity to SEQ ID NO:79. In some embodiments, the VH sequence comprises SEQ ID NO:79.

[0590] In some embodiments, the antibody or antigen-binding fragment comprises a VL sequence that has at least 85% sequence identity to any one of SEQ ID NOS:2691, 2699, 2704, 2708, 2710, and 2741. In some embodiments, the VL sequence has at least 90% sequence identity to SEQ ID NO:2704. In some embodiments, the VL sequence has at least 95% sequence identity to SEQ ID NO:2704. In some embodiments, the VL sequence comprises SEQ ID NO:2704. In some embodiments, the VL sequence has at least 90% sequence identity to SEQ ID NO:2710. In some embodiments, the VL sequence has at least 95% sequence identity to SEQ ID NO:2710. In some embodiments, the VL sequence comprises SEQ ID NO:2710. In some embodiments, the VL sequence has at least 90% sequence identity to SEQ ID NO:2741. In some embodiments, the VL sequence has at least 95% sequence identity to SEQ ID NO:2741. In some embodiments, the VL sequence comprises SEQ ID NO:2741.

[0591] In some embodiments, the antibody or antigen-binding fragment comprises:
[0592] (a) a VH sequence comprising SEQ ID NO:2703 and a VL sequence comprising SEQ ID NO:2704; or
[0593] (b) a VH sequence comprising SEQ ID NO:2707 and a VL sequence comprising SEQ ID NO:2708; or
[0594] (c) a VH sequence comprising SEQ ID NO:2709 and a VL sequence comprising SEQ ID NO:2708; or
[0595] (d) a VH sequence comprising SEQ ID NO:2707 and a VL sequence comprising SEQ ID NO:2710; or
[0596] (e) a VH sequence comprising SEQ ID NO:79 and a VL sequence comprising SEQ ID NO:2710; or
[0597] (f) a VH sequence comprising SEQ ID NO:2712 and a VL sequence comprising SEQ ID NO:2708; or
[0598] (g) a VH sequence comprising SEQ ID NO:2714 and a VL sequence comprising SEQ ID NO:2708; or
[0599] (h) a VH sequence comprising SEQ ID NO:2712 and a VL sequence comprising SEQ ID NO:2710; or
[0600] (i) a VH sequence comprising SEQ ID NO:2714 and a VL sequence comprising SEQ ID NO:2710; or
[0601] (j) a VH sequence comprising SEQ ID NO:2690 and a VL sequence comprising SEQ ID NO:2691; or
[0602] (k) a VH sequence comprising SEQ ID NO:2698 and a VL sequence comprising SEQ ID NO:2699; or
[0603] (1) a VH sequence comprising SEQ ID NO:2712 and a VL sequence comprising SEQ ID NO:2741.

[0604] In some embodiments, an antibody or antigen-binding fragment thereof that specifically binds to TREM2 comprises:
[0605] (a) a CDR-H1 sequence comprising the amino acid sequence of any one of SEQ ID NOS:2692, 2700, and 2717;
[0606] (b) a CDR-H2 sequence comprising the amino acid sequence of any one of SEQ ID NOS:2693, 2701, 2713, 2718, 2727, 2729, and 2731;
[0607] (c) a CDR-H3 sequence comprising the amino acid sequence of any one of SEQ ID NOS:2694, 2702, 2705, and 2719;
[0608] (d) a CDR-L1 sequence comprising the amino acid sequence of any one of SEQ ID NOS:2695, 2711, and 2720;
[0609] (e) a CDR-L2 sequence comprising the amino acid sequence of any one of SEQ ID NOS:2696 and 2721; and
[0610] (f) a CDR-L3 sequence comprising the amino acid sequence of any one of SEQ ID NOS:2697, 2706, and 2722.

[0611] In some embodiments, the antibody or antigen-binding fragment comprises:
[0612] (a) a CDR-H1 comprising the amino acid sequence of SEQ ID NO:2692, a CDR-H2 comprising the amino acid sequence of SEQ ID NO:2693, a CDR-H3 comprising the amino acid sequence of SEQ ID NO:2694, a CDR-L1 comprising the amino acid sequence of SEQ ID NO:2695, a CDR-L2 comprising the amino acid sequence of SEQ ID NO:2696, and a CDR-L3 comprising the amino acid sequence of SEQ ID NO:2697; or
[0613] (b) a CDR-H1 comprising the amino acid sequence of SEQ ID NO:2692, a CDR-H2 comprising the amino acid sequence of SEQ ID NO:2693, a CDR-H3 comprising the amino acid sequence of SEQ ID NO:2705, a CDR-L1 comprising the amino acid sequence of SEQ ID NO:2695, a CDR-L2 comprising the amino acid sequence of SEQ ID NO:2696, and a CDR-L3 comprising the amino acid sequence of SEQ ID NO:2706; or
[0614] (c) a CDR-H1 comprising the amino acid sequence of SEQ ID NO:2692, a CDR-H2 comprising the amino acid sequence of SEQ ID NO:2693, a CDR-H3 comprising the amino acid sequence of SEQ ID NO:2705, a CDR-L1 comprising the amino acid sequence of SEQ ID NO:2711, a CDR-L2 comprising the amino acid sequence of SEQ ID NO:2696, and a CDR-L3 comprising the amino acid sequence of SEQ ID NO:2706; or
[0615] (d) a CDR-H1 comprising the amino acid sequence of SEQ ID NO:2692, a CDR-H2 comprising the amino acid sequence of SEQ ID NO:2713, a CDR-H3 comprising the amino acid sequence of SEQ ID NO:2705, a CDR-L1 comprising the amino acid sequence of SEQ ID NO:2695, a CDR-L2 comprising the amino acid sequence of SEQ ID NO:2696, and a CDR-L3 comprising the amino acid sequence of SEQ ID NO:2706; or
[0616] (e) a CDR-H1 comprising the amino acid sequence of SEQ ID NO:2692, a CDR-H2 comprising the amino acid sequence of SEQ ID NO:2713, a CDR-H3 comprising the amino acid sequence of SEQ ID NO:2705, a CDR-L1 comprising the amino acid sequence of SEQ ID NO:2711, a CDR-L2 comprising the amino acid sequence of SEQ ID NO:2696, and a CDR-L3 comprising the amino acid sequence of SEQ ID NO:2706; or
[0617] (f) a CDR-H1 comprising the amino acid sequence of SEQ ID NO:2700, a CDR-H2 comprising the amino acid sequence of SEQ ID NO:2701, a CDR-H3 comprising the amino acid sequence of SEQ ID NO:2702, a CDR-L1 comprising the amino acid sequence of SEQ ID NO:2695, a CDR-L2 comprising the amino acid sequence of SEQ ID NO:2696, and a CDR-L3 comprising the amino acid sequence of SEQ ID NO:2697;
[0618] (g) a CDR-H1 comprising the amino acid sequence of SEQ ID NO:2717, a CDR-H2 comprising the amino acid sequence of SEQ ID NO:2718, a CDR-H3 comprising the amino acid sequence of SEQ ID NO:2719, a CDR-L1 comprising the amino acid sequence of SEQ ID NO:2720, a CDR-L2 comprising the amino acid sequence of SEQ ID NO:2721, and a CDR-L3 comprising the amino acid sequence of SEQ ID NO:2722; or
[0619] (h) a CDR-H1 comprising the amino acid sequence of SEQ ID NO:2717, a CDR-H2 comprising the amino acid sequence of SEQ ID NO:2727, a CDR-H3 comprising the amino acid sequence of SEQ ID NO:2719, a CDR-L1 comprising the amino acid sequence of SEQ ID NO:2720, a CDR-L2 comprising the amino acid sequence of SEQ ID NO:2721, and a CDR-L3 comprising the amino acid sequence of SEQ ID NO:2722; or
[0620] (i) a CDR-H1 comprising the amino acid sequence of SEQ ID NO:2717, a CDR-H2 comprising the amino acid sequence of SEQ ID NO:2729, a CDR-H3 comprising the amino acid sequence of SEQ ID NO:2719, a CDR-L1 comprising the amino acid sequence of SEQ ID NO:2720, a CDR-L2 comprising the amino acid sequence of SEQ ID NO:2721, and a CDR-L3 comprising the amino acid sequence of SEQ ID NO:2722; or
[0621] (j) a CDR-H1 comprising the amino acid sequence of SEQ ID NO:2717, a CDR-H2 comprising the amino acid sequence of SEQ ID NO:2731, a CDR-H3 comprising the amino acid sequence of SEQ ID NO:2719, a CDR-L1 comprising the amino acid sequence of SEQ ID NO:2720, a CDR-L2 comprising the amino acid sequence of SEQ ID NO:2721, and a CDR-L3 comprising the amino acid sequence of SEQ ID NO:2722; or
[0622] (k) a CDR-H1 comprising the amino acid sequence of SEQ ID NO:2692, a CDR-H2 comprising the amino acid sequence of SEQ ID NO:2713, a CDR-H3 comprising the amino acid sequence of SEQ ID NO:2705, a CDR-L1 comprising the amino acid sequence of SEQ ID NO:2695, a CDR-L2 comprising the amino acid sequence of SEQ ID NO:2696, and a CDR-L3 comprising the amino acid sequence of SEQ ID NO:2697.

[0623] In some embodiments, the antibody or antigen-binding fragment comprises:
[0624] (a) a VH sequence that has at least 85% sequence identity to SEQ ID NO:2690 and a VL sequence that has at least 85% sequence identity to SEQ ID NO:2691; or
[0625] (b) a VH sequence that has at least 85% sequence identity to SEQ ID NO: 2698 and a VL sequence that has at least 85% sequence identity to SEQ ID NO:2699; or
[0626] (c) a VH sequence that has at least 85% sequence identity to SEQ ID NO:2703 and a VL sequence that has at least 85% sequence identity to SEQ ID NO:2704; or
[0627] (d) a VH sequence that has at least 85% sequence identity to SEQ ID NO:2707 and a VL sequence that has at least 85% sequence identity to SEQ ID NO:2708; or a VH sequence that has at least 85% sequence identity to SEQ ID NO:2709 and a VL sequence that has at least 85% sequence identity to SEQ ID NO:2708; or
[0628] (f) a VH sequence that has at least 85% sequence identity to SEQ ID NO: 2707 and a VL sequence that has at least 85% sequence identity to SEQ ID NO:2710; or
[0629] (g) a VH sequence that has at least 85% sequence identity to SEQ ID NO:79 and a VL sequence that has at least 85% sequence identity to SEQ ID NO:2710; or
[0630] (h) a VH sequence that has at least 85% sequence identity to SEQ ID NO:2712 and a VL sequence that has at least 85% sequence identity to SEQ ID NO:2708; or
[0631] (i) a VH sequence that has at least 85% sequence identity to SEQ ID NO:2714 and a VL sequence that has at least 85% sequence identity to SEQ ID NO:2708; or
[0632] (j) a VH sequence that has at least 85% sequence identity to SEQ ID NO:2712 and a VL sequence that has at least 85% sequence identity to SEQ ID NO:2710; or
[0633] (k) a VH sequence that has at least 85% sequence identity to SEQ ID NO: 2714 and a VL sequence that has at least 85% sequence identity to SEQ ID NO:2710; or
[0634] (l) a VH sequence that has at least 85% sequence identity to SEQ ID NO: 2715 and a VL sequence that has at least 85% sequence identity to SEQ ID NO:2716; or
[0635] (m) a VH sequence that has at least 85% sequence identity to SEQ ID NO:2723 and a VL sequence that has at least 85% sequence identity to SEQ ID NO:2724; or
[0636] (n) a VH sequence that has at least 85% sequence identity to SEQ ID NO: 2725 and a VL sequence that has at least 85% sequence identity to SEQ ID NO:2724; or
[0637] (o) a VH sequence that has at least 85% sequence identity to SEQ ID NO: 2726 and a VL sequence that has at least 85% sequence identity to SEQ ID NO:2724; or
[0638] (p) a VH sequence that has at least 85% sequence identity to SEQ ID NO:2728 and a VL sequence that has at least 85% sequence identity to SEQ ID NO:2724; or
[0639] (q) a VH sequence that has at least 85% sequence identity to SEQ ID NO:2730 and a VL sequence that has at least 85% sequence identity to SEQ ID NO:2724; or
[0640] (r) a VH sequence that has at least 85% sequence identity to SEQ ID NO: 2732 and a VL sequence that has at least 85% sequence identity to SEQ ID NO:2724; or
[0641] (s) a VH sequence that has at least 85% sequence identity to SEQ ID NO: 2733 and a VL sequence that has at least 85% sequence identity to SEQ ID NO:2724; or
[0642] (t) a VH sequence that has at least 85% sequence identity to SEQ ID NO: 2734 and a VL sequence that has at least 85% sequence identity to SEQ ID NO:2724; or
[0643] (u) a VH sequence that has at least 85% sequence identity to SEQ ID NO:2712 and a VL sequence that has at least 85% sequence identity to SEQ ID NO:2741.

[0644] In some embodiments, an antibody or antigen-binding fragment thereof that specifically binds to TREM2 recognizes an epitope that is the same or substantially the same as the epitope recognized by antibody clone selected from the group consisting of: CL0020306, Clone CL0020188, Clone CL0020188-1, Clone CL0020188-2, Clone CL0020188-3, Clone CL0020188-4, Clone CL0020188-5, Clone CL0020188-6, Clone CL0020188-7, Clone CL0020188-8, Clone CL0020307, Clone CL0020123, Clone CL0020123-1, Clone CL0020123-2, Clone CL0020123-3, Clone CL0020123-4, Clone CL0020123-5, Clone CL0020123-6, Clone CL0020123-7, and Clone CL0020123-8.

[0645] In some embodiments, the antibody or antigen-binding fragment recognizes an epitope that is the same or substantially the same as the epitope recognized by an antibody clone selected from the group consisting of: Clone CL0020123, Clone CL0020123-1, Clone CL0020123-2, Clone CL0020123-3, Clone CL0020123-4, Clone CL0020123-5, Clone CL0020123-6, Clone CL0020123-7, and Clone CL0020123-8. In particular embodiments, the antibody or antigen-binding fragment recognizes one or more of the following epitopes in SEQ ID NO: 1: (i) amino acid residues 55-63 (GEKGPCQRV (SEQ ID NO:2743)), (ii) amino acids 96-107 (TLRNLQPHDAGL (SEQ ID NO:2744)), and (iii) amino acid residues 126-129 (VEVL (SEQ ID NO:2745)). In another aspect, the disclosure features an isolated antibody or antigen-binding fragment thereof that specifically binds to a human TREM2, wherein the antibody or antigen-binding fragment thereof recognizes an epitope comprising or consisting of one or more of the following epitopes in SEQ ID NO: 1: (i) amino acid residues 55-63 (GEKGPCQRV (SEQ ID NO:2743)), (ii) amino acids 96-107 (TLRNLQPHDAGL (SEQ ID NO:2744)), and (iii) amino acid residues 126-129 (VEVL (SEQ ID NO:2745)). In some embodiments, the antibody or antigen-binding fragment recognizes an epitope that is the same or substantially the same as the epitope recognized by an antibody clone selected from the group consisting of: Clone CL0020188, Clone CL0020188-1, Clone CL0020188-2, Clone CL0020188-3, Clone CL0020188-4, Clone CL0020188-5, Clone CL0020188-6, Clone CL0020188-7, Clone CL0020188-8, Clone CL0020307, and Clone CL0020306. In particular embodiments, the antibody or antigen-binding fragment recognizes amino acid residues 143149 (FPGESES (SEQ ID NO:2742)) in SEQ ID NO: 1. In another aspect, the disclosure features an isolated antibody or antigen-binding fragment thereof that specifically binds to a human TREM2, wherein the antibody or antigen-binding fragment thereof recognizes an epitope comprising or consisting of amino acid residues 143-149 (FPGESES (SEQ ID NO:2742)) in SEQ ID NO:1.

[0646] In some embodiments, an antibody or antigen-binding fragment as disclosed herein decreases levels of soluble TREM2 protein (sTREM2). In some embodiments, an antibody or antigen-binding fragment as disclosed herein binds soluble TREM2 protein (sTREM2) in healthy human CSF or cynomolgus CSF with better potency compared to a reference antibody. In some embodiments, the reference antibody is represented by a combination of sequences selected from the group consisting of: SEQ ID NOS:2746 and 2747; SEQ ID NOS:2748 and 2749; and SEQ ID NOS:2750 and 2751.

[0647] In some embodiments, the antibody is an antibody having a VL, VH, full heavy chain sequence, full light chain sequence, a CDR sequence, or a full sequence disclosed in the “Informal Sequence Listing” Table IX of PCT Patent Application Publication No. WO 2020/172450 A1, which are reproduced below as TABLE L1.

TABLE L1

| Description | Sequence |
|---|---|
| Human TREM2 Protein | MEPLRLLILLFVTELSGAHNTTVFQGVAGQSLQVS |
| | CPYDSMKHWGRRKAWCRQLGEKGPCQRVVSTH |
| | NLWLLSFLRRWNGSTAITDDTLGGTLTITLRNLQP |
| | HDAGLYQCQSLHGSEADTLRKVLVEVLADPLDH |
| | RDAGDLWFPGESESFEDAHVEHSISRSLLEGEIPFP |
| | PTSILLLLACIFLIKILAASALWAAAWHGQKPGTH |
| | PPSELDCGHDPGYQLQTLPGLRDT (SEQ ID NO: 1) |
| CL0020306 VH | EVKLLDSGGGLVQAGGSLRLSCAGSGFTFTDFYM |
| | SWIRQPPGKAPEWLGVIRNKANGYTAGYNPSVK |
| | GRFTISRDNTQNILYLQMNTL |
| | RAEDTAIYYCARLSYGFDYWGQGVMVTVSS |
| | (SEQ ID NO: 2690) |
| CL0020306 VL | DIVMTQGALPNPVPSGESASITCQSSKSLLHSNGK |
| | TYLNWYLQRPGQSPQLLIYWMSTRASGVSDRFSG |
| | SGSGTDFTLKISSVEAEDVG |
| | VYYCQQFLEFPFTFGSGTKLEIK (SEQ ID NO :2691) |
| CL0020306 CDR-H1; CDR-H1 for | GFTFTDFYMS (SEQ ID NO: 2692) |
| CL0020188 and variants CL0020188-1, | |
| CL0020188-2, CL0020188-3, CL0020188-4, | |
| CL0020188-5, CL0020188-6, | |
| CL0020188-7, and CL0020188-8 | |
| CL0020306 CDR-H2; CDR-H2 for | VIRNKANGYTAGYNPSVKG (SEQ ID NO: 2693) |
| CL0020188 and variants CL0020188-1, | |
| CL0020188-2, CL0020188-3, and | |
| CL0020188-4 | |
| CL0020306 CDR-H3 | ARLSYGFDY (SEQ ID NO: 2694) |
| CL0020306 CDR-L1; CL0020307 CDR- | QSSKSLLHSNGKTYLN (SEQ ID NO: 2695) |
| L1; CL0020307-1 CDR-L1; CDR-L1 for | |
| CL0020188 and variants CL0020188-1, | |
| CL0020188-2, CL0020188-5, and | |
| CL0020188-6 | |
| CL0020306 CDR-L2; CL0020307 CDR-L2; | WMSTRAS (SEQ ID NO: 2696) |
| CL0020307-1 CDR-L2; CDR-L2 for | |
| CL0020188 and variants CL0020188-1, | |
| CL0020188-2, CL0020188-3, CL0020188-4, | |
| CL0020188-5, CL0020188-6, CL0020188-7, | |
| and CL0020188-8 | |
| CL0020306 CDR-L3; CL0020307 CDR- | QQFLEFPFT (SEQ ID NO: 2697) |
| L3; CL0020307-1 CDR-L3 | |
| CL0020307 V_{H} | EVKLLESGGGLVQPGGSLRLSCAASGFTFTNFYM |
| | SWIRQPPGRAPEWLGVIRNRPNGYTTDYNPSVKG |
| | RFTISRDNTQNILYLQMSTLRADDTAFYYCTRLTY |
| | GFDYWGQGVMVTVSS (SEQ ID NO: 2698) |
| CL0020307 VL | DIVMTQGALPNPVPSGESASITCQSSKSLLHSNGK |
| | TYLNWYLQRPGQSPQLLIYWMSTRASGVSDRFSG |
| | SGSGTDFTLKIS |
| | SVEAEVVGVYYCQQFLEFPFTFGSGTKLEIK |
| | (SEQ ID NO: 2699) |
| CL0020307 CDR-H1 | GFTFTNFYMS (SEQ ID NO: 2700) |
| CL0020307 CDR-H2 | VIRNRPNGYTTDYNPSVKG (SEQ ID NO: 2701) |
| CL0020307 CDR-H3 | TRLTYGFDY (SEQ ID NO: 2702) |
| CL0020188 VH | EVKLLDSGGGLVQAGGSLRLSCAGSGFTFTDFYM |
| | SWIRQPPGKAPEWLGVIRNKANGYTAGYNPSVK |
| | GRFTISRDNTQNILYLQMNTLRAEDTAIYYCARLT |
| | YGFDYWGQGVMVTVSS (SEQ ID NO: 2703) |
| CL0020188 VL | DIVMTQGALPNPVPSGESASITCQSSKSLLHSNGK |
| | TYLNWYLQR |
| | PGQSPQLLIYWMSTRASGVSDRFSGSGSGTDFTLK |
| | ISSVEAEDVGVYYCQQFLEYPFTFGSGTKLEIK |
| | (SEQ ID NO: 2704) |
| CDR-H3 for CL0020188 and variants | ARLTYGFDY (SEQ ID NO: 2705) |
| CL0020188-1, CL0020188-2, CL0020188-3, | |
| CL0020188-4, CL0020188-5, | |
| CL0020188-6, CL0020188-7, and | |
| CL0020188-8 | |
| CDR-L3 for CL0020188 and variants | QQFLEYPFT (SEQ ID NO: 2706) |
| CL0020188-1, CL0020188-2, CL0020188- | |
| 3, CL0020188-4, CL0020188-5, | |
| CL0020188-6, CL0020188-7, and | |
| CL0020188-8 | |
| CL0020188-1 VH; CL0020188-3 VH | EVQLVESGGGLVQPGGSLRLSCAASGFTFTDFYM |
| | SWVRQAPGKGLEWVSVIRNKANGYTAGYNPSVK |
| | GRFTISRDNSKNTLYLQMNSLRAEDTAVYYCARL |
| | TYGFDYWGQGTLVTVSS (SEQ ID NO: 2707) |
| CL0020188-1 VL; CL0020188-2 VL; | DIVMTQTPLSLPVTPGEPASISCQSSKSLLHSNGKT |
| CL0020188-5 VL; CL0020188-6 VL | YLNWYLQKPGQSPQLLIYWMSTRASGVPDRFSGS |
| | GSGTDFTLKISRVEAEDVGVYYCQQFLEYPFTFG |
| | QGTKVEIK (SEQ ID NO: 2708) |
| CL0020188-2 VH | EVQLVESGGGLVQPGGSLRLSCAGSGFTFTDFYM |
| | SWVRQAPGKGLEWVSVIRNKANGYTAGYNPSVK |
| | GRFTISRDNSKNTLYLQMNSLRAEDTAVYYCARL |
| | TYGFDYWGQGTLVTVSS (SEQ ID NO: 2709) |
| CL0020188-3 VL; CL0020188-4 VL; | DIVMTQTPLSLPVTPGEPASISCQSSKSLLHSTGKT |
| CL0020188-7 VL; CL0020188-8 VL | YLNWYLQKPGQSPQLLIYWMSTRASGVPDRFSGS |
| | GSGTDFTLKISRVEAEDVGVYYCQQFLEYPFTFG |
| | QGTKVEIK (SEQ ID NO: 2710) |
| CDR-L1 for variants CL0020188-3, | QSSKSLLHSTGKTYLN (SEQ ID NO: 2711) |
| CL0020188-4, CL0020188-7, and | |
| CL0020188-8 | |
| CL0020188-5 VH; CL0020188-7 VH | EVQLVESGGGLVQPGGSLRLSCAASGFTFTDFYM |
| | SWVRQAPGKGLEWVSVIRNKANAYTAGYNPSVK |
| | GRFTISRDNSKNTLYLQMNSLRAEDTAVYYCARL |
| | TYGFDYWGQGTLVTVSS (SEQ ID NO: 2712) |
| CDR-H2 for variants CL0020188-5, | VIRNKANAYTAGYNPSVKG (SEQ ID NO: 2713) |
| CL0020188-6, CL0020188-7, and | |
| CL0020188-8 | |
| CL0020188-6 VH; CL0020188-8 VH | EVQLVESGGGLVQPGGSLRLSCAGSGFTFTDFYM |
| | SWVRQAPGKGPEWLSVIRNKANAYTAGYNPSVK |
| | GRFTISRDNSKNTLYLQMNSLRAEDTAVYYCARL |
| | TYGFDYWGQGTLVTVSS (SEQ ID NO: 2714) |
| CL0020123 VH | EVQLQQSGAELVRSGASVKLSCTASGFSIEDFYIH |
| | WVKQRPEQGLEWIGWIDPENGDSKYAPKFQGKA |
| | TMTADTSSNTAYLHLSSLTSEDTAVYYCHADHGN |
| | YGSTMDYWGQGTSVTVSS (SEQ ID NO: 2715) |
| CL0020123 VL | DIQMNQSPSSLSASLGDTVTITCHASQHINVWLSW |
| | YQQKPGDHPKLLIYKASNLHTGVPSRFSGSGSGT |
| | GFTLTISSLQPEDIATYYCQQGQTYPRTFGGGTKL |
| | EIK (SEQ ID NO: 2716) |
| CDR-H1 for CL0020123 and variants | GFSIEDFYIH (SEQ ID NO: 2717) |
| CL0020123-1, CL0020123-2, CL0020123- | |
| 3, CL0020123-4, CL0020123-5, | |
| CL0020123-6, CL0020123-7, and | |
| CL0020123-8 | |
| CDR-H2 for CL0020123 and variants | WIDPENGDSKYAPKFQG (SEQ ID NO: 2718) |
| CL0020123-1 and CL0020123-2 | |
| CDR-H3 for CL0020123 and variants | HADHGNYGSTMDY (SEQ ID NO: 2719) |
| CL0020123-1, CL0020123-2, CL0020123- | |
| 3, CL0020123-4, CL0020123-5, | |
| CL0020123-6, CL0020123-7, and | |
| CL0020123-8 | |
| CDR-L1 for CL0020123 and variants | HASQHINVWLS (SEQ ID NO: 2720) |
| CL0020123-1, CL0020123-2, CL0020123- | |
| 3, CL0020123-4, CL0020123-5, | |
| CL0020123-6, CL0020123-7, and | |
| CL0020123-8 | |
| CDR-L2 for CL0020123 and variants | KASNLHT (SEQ ID NO: 2721) |
| CL0020123-1, CL0020123-2, CL0020123-3, | |
| CL0020123-4, CL0020123-5, | |
| CL0020123-6, CL0020123-7, and | |
| CL0020123-8 | |
| CDR-L3 for CL0020123 and variants | QQGQTYPRT (SEQ ID NO: 2722) |
| CL0020123-1, CL0020123-2, CL0020123-3, | |
| CL0020123-4, CL0020123-5, | |
| CL0020123-6, CL0020123-7, and | |
| CL0020123-8 | |
| CL0020123-1 VH | QVQLVQSGAEVKKPGASVKVSCKASGFSIEDFYI |
| | HWVRQAPGQGLEWMGWIDPENGDSKYAPKFQG |
| | RATITADTSTSTAYMELSSLRSEDTAVYYCHADH |
| | GNYGSTMDYWGQGTLVTVSS (SEQ ID NO: 2723) |
| CL0020123-1 VL; CL0020123-2 VL; | DIQMTQSPSSLSASVGDRVTITCHASQHINVWLS |
| CL0020123-3 VL; CL0020123-4 VL | WYQQKPGKAPKLLIYKASNLHTGVPSRFSGSGSG |
| CL0020123-5 VL; CL0020123-6 VL; | TDFTLTISSLQPEDFATYYCQQGQTYPRTFGQGTK |
| CL0020123-7 VL; CL0020123-8 VL | VEIK (SEQ ID NO: 2724) |
| CL0020123-2 VH | QVQLVQSGAEVKKPGASVKVSCKASGFSIEDFYI |
| | HWVRQAPGQGLEWMGWIDPENGDSKYAPKFQG |
| | RVTITADTSTSTAYMELSSLRSEDTAVYYCHADH |
| | GNYGSTMDYWGQGTLVTVSS (SEQ ID NO: 2725) |
| CL0020123-3 VH | QVQLVQSGAEVKKPGASVKVSCKASGFSIEDFYI |
| | HWVRQAPGQGLEWMGWIDPEQGDSKYAPKFQG |
| | RATITADTSTSTAYMELSSLRSEDTAVYYCHADH |
| | GNYGSTMDYWGQGTLVTVSS (SEQ ID NO: 2726) |
| CDR-H2 for variants CL0020123-3 and | WIDPEQGDSKYAPKFQG (SEQ ID NO: 2727) |
| CL0020123-6 | |
| CL0020123-4 VH | QVQLVQSGAEVKKPGASVKVSCKASGFSIEDFYI |
| | HWVRQAPGQGLEWMGWIDPENGESKYAPKFQG |
| | RATITADTSTSTAYMELSSLRSEDTAVYYCHADH |
| | GNYGSTMDYWGQGTLVTVSS (SEQ ID NO: 2728) |
| CDR-H2 for variants CL0020123-4 and | WIDPENGESKYAPKFQG (SEQ ID NO: 2729) |
| CL0020123-7 | |
| CL0020123-5 VH | QVQLVQSGAEVKKPGASVKVSCKASGFSIEDFYI |
| | HWVRQAPGQGLEWMGWIDPEQGESKYAPKFQG |
| | RATITADTSTSTAYMELSSLRSEDTAVYYCHADH |
| | GNYGSTMDYWGQGTLVTVSS (SEQ ID NO: 2730) |
| CDR-H2 for variants CL0020123-5 and | WIDPEQGESKYAPKFQG (SEQ ID NO: 2731) |
| CL0020123-8 | |
| CL0020123-6 VH | QVQLVQSGAEVKKPGASVKVSCKASGFSIEDFYI |
| | HWVRQAPGQGLEWMGWIDPEQGDSKYAPKFQG |
| | RVTITADTSTSTAYMELSSLRSEDTAVYYCHADH |
| | GNYGSTMDYWGQGTLVTVSS (SEQ ID NO: 2732) |
| CL0020123-7 VH | QVQLVQSGAEVKKPGASVKVSCKASGFSIEDFYI |
| | HWVRQAPGQGLEWMGWIDPENGESKYAPKFQG |
| | RVTITADTSTSTAYMELSSLRSEDTAVYYCHADH |
| | GNYGSTMDYWGQGTLVTVSS (SEQ ID NO: 2733) |
| CL0020123-8 VH | QVQLVQSGAEVKKPGASVKVSCKASGFSIEDFYI |
| | HWVRQAPGQGLEWMGWIDPEQGESKYAPKFQG |
| | RVTITADTSTSTAYMELSSLRSEDTAVYYCHADH |
| | GNYGSTMDYWGQGTLVTVSS (SEQ ID NO: 2734) |
| CDR-H2 consensus sequence | W-I-D-P-E-β6-G-β8-S-K-Y-A-P-K-F-Q-G, wherein (β6 |
| | is N or Q and (β8 is D or E (SEQ ID NO: 2735) |
| CDR-H1 consensus sequence | G-F-T-F-T-α6-F-Y-M-S, wherein α6 is D or N |
| | (SEQ ID NO: 2736) |
| CDR-H2 consensus sequence | V-I-R-N-β5-β6-N-β8-Y-T-β11-β12-Y-N-P-S-V-K-G, |
| | wherein β5 is K or R; β6 is A or P; β8 is G or A; |
| | β11 is A or T; and β12 is G or D (SEQ ID NO: 2737) |
| CDR-H3 consensus sequence | γ1-R-L-γ4-Y-G-F-D-Y, wherein γ1 is A or T; and γ4 |
| | is T or S (SEQ ID NO: 2738) |
| CDR-L1 consensus sequence | Q-S-S-K-S-L-L-H-S-δ10-G-K-T-Y-L-N, wherein δ10 is |
| | N or T (SEQ ID NO: 2739) |
| CDR-L3 consensus sequence | Q-Q-F-L-E-f6-P-F-T, wherein f6 is Y or F |
| | (SEQ ID NO: 2740) |
| CL0020307-1 VL | DIVMTQSPDSLAVSLGERATINCQSSKSLLHSNGK |
| | TYLNWYQQKPGQPPKLLIYWMSTRASGVPDRFS |
| | GSGSGTDFTLTISSLQAEDVAVYYCQQFLEFPFTF |
| | GQGTKVEIK (SEQ ID NO: 2741) |
| TREM2 epitope | FPGESES (SEQ ID NO: 2742) |
| TREM2 epitope | GEKGPCQRV (SEQ ID NO: 2743) |
| TREM2 epitope | TLRNLQPHDAGL (SEQ ID NO: 2744) |
| TREM2 epitope | VEVL (SEQ ID NO: 2745) |
| Reference antibody #1 VL | DIQMTQSPSSVSASVGDRVTITCRASQGISNWLA |
| | WYQQKPGKAPKLLIYAASSLQVGVPLRFSGSGSG |
| | TDFTLTISSLQPEDFATYYCQQADSFPRNFGQGTK |
| | LEIK (SEQ ID NO: 2746) |
| Reference antibody #1 VH | EVQLVQSGAEVKKPGESLKISCKGSGHSFTNYWI |
| | AWVRQMPGKGLEWMGIIYPGDSDTRYSPSFQGQ |
| | VTISADKSISTAYLQWSSLKASDTAVYFCARQRTF |
| | YYDSSGYFDYWGQGTLVTVSS (SEQ ID NO: 2747) |
| Reference antibody #2 VL | DIQMTQSPSSVSASVGDRVTITCRASQGISSWLAW |
| | YQQKPGKAPKLLIYAASSLQNGVPSRFSGSGSGT |
| | DFTLTISSLQPEDFATYFCQQADSFPRTFGQGTKL |
| | EIK (SEQ ID NO: 2748) |
| Reference antibody #2 VH | EVQLVQSGAEVKKPGESLKISCKGSGYSFTSYWIA |
| | WVRQMPGKGLEWMGIIYPGDSDTRYSPSFQGQV |
| | TISADKSISTAYLQWSSLKASDTAMYFCARQRTF |
| | YYDSSDYFDYWGQGTLVTVSS (SEQ ID NO: 2749) |
| Reference antibody #3 VL | DVVMTQSPDSLAVSLGERATINCRSSQSLVHSNR |
| | YTYLHWYQQKPGQSPKWYKVSNRFSGVPDRFS |
| | GSGSGTDFTLKISRVEAEDVGVYYCSQSTRVPYTF |
| | GQGTKLEIK (SEQ ID NO: 2750) |
| Reference antibody #3 VH | QVQLVQSGAEVKKPGASVKVSCKASGYAFSSQW |
| | MNWVRQAPGQRLEWIGRIYPGGGDTNYAGKFQG |
| | RVTITADTSASTAYMELSSLRSEDTAVYYCARLL |
| | RNQPGESYAMDYWGQGTLVTVSS |
| | (SEQ ID NO: 2751) |
| CL0020188-4 VH | EVQLVESGGGLVQPGGSLRLSCAGSGFTFTDFYM |
| | SWVRQAPGKGPEWLSVIRNKANGYTAGYNPSVK |
| | GRFTISRDNSKNTLYLQMNSLRAEDTAVYYCARL |
| | TYGFDYWGQGTLVTVSS (SEQ ID NO: 2752) |

[0648] In some embodiments, each of the light chain variable regions and each of the heavy chain variable regions disclosed in TABLE L1 as well as specific combinations thereof and other embodiments of the anti-TREM2 antibody described in the '450 application and herein may be attached to the light chain constant regions (TABLE EN1) and heavy chain constant regions (TABLE EN2) to form complete antibody light and heavy chains, respectively, as further discussed below. Further, each of the generated heavy and light chain sequences may be combined to form a complete antibody structure. It should be understood that the heavy chain and light chain variable regions provided herein can also be attached to other constant domains having different sequences than the exemplary sequences listed herein.

M. PCT Patent Application Publication No. WO2021/101823A1

[0649] In some embodiments, the TREM2 agonist is an antibody, or an antigen-binding fragment thereof, as described in PCT Patent Application Publication No. WO2021101823A1 (“the '823 application”), which is incorporated by reference herein, in its entirety.

[0650] In some embodiments, the antibody or antigen-binding fragment thereof comprises:
[0651] (a) a CDR-H1 sequence comprising the sequence of GFSFNTYWIG (SEQ ID NO:2753);
[0652] (b) a CDR-H2 sequence comprising the sequence of IIYPGDQDIRYSPSFQG (SEQ ID NO:2754;
[0653] (c) a CDR-H3 sequence comprising the sequence of ARYGRYIYGYGGYHGMDV (SEQ ID NO:2755;
[0654] (d) CDR-L1 sequence comprising the sequence of RASQAIRDDLG (SEQ ID NO:2756);
[0655] (e) a CDR-L2 sequence comprising the sequence of YAASSLQS (SEQ ID NO:2757); and
[0656] (f) a CDR-L3 sequence comprising the sequence of LQNYNYPHT (SEQ ID NO:2758).

[0657] In some embodiments, the antibody or antigen-binding fragment comprises a CDR-H1 comprising the amino acid sequence of SEQ ID NO:2753, a CDR-H2 comprising the amino acid sequence of SEQ ID NO:2754, a CDR-H3 comprising the amino acid sequence of SEQ ID NO:2755, a CDR-L1 comprising the amino acid sequence of SEQ ID NO:2756, a CDR-L2 comprising the amino acid sequence of SEQ ID NO:2757, and a CDR-L3 comprising the amino acid sequence of SEQ ID NO:2758.

[0658] In some embodiments, the antibody or antigen-binding fragment comprises a VH sequence that has at least 85% sequence identity to SEQ ID NO:2759. In some embodiments, the V_{H}sequence has at least 90% sequence identity to SEQ ID NO:2759. In some embodiments, the V_{H}sequence has at least 95% sequence identity to SEQ ID NO:2759. In some embodiments, the V_{H}sequence comprises SEQ ID NO:2759.

[0659] In some embodiments, the antibody or antigen-binding fragment comprises a V_{L} sequence that has at least 85% sequence identity to SEQ ID NO:2760. In some embodiments, the V_{L} sequence has at least 90% sequence identity to SEQ ID NO:2760. In some embodiments, the V_{L} sequence has at least 95% sequence identity to SEQ ID NO:2760. In some embodiments, the V_{L} sequence comprises SEQ ID NO:2760.

[0660] In some embodiments, the antibody or antigen-binding fragment comprises a VH sequence comprising SEQ ID NO:2759 and a V_{L} sequence comprising SEQ ID NO:2760.

[0661] In some embodiments, an antibody or antigen-binding fragment thereof that specifically binds to TREM2 recognizes an epitope that is the same or substantially the same as the epitope recognized by Antibody 1 of the '823 application.

[0662] In some embodiments, the antibody or antigen-binding fragment recognizes an epitope present on the extracellular domain of a human TREM2. In particular embodiments, the antibody or antigen-binding fragment recognizes an epitope present on the extracellular domain of a human TREM2 in SEQ ID NO:2763. In some embodiments, the antibody or antigen-binding fragment recognizes an epitope present on the extracellular domain of a mouse TREM2. In particular embodiments, the antibody or antigen-binding fragment recognizes an epitope present on the extracellular domain of a mouse TREM2 in SEQ ID NO:2764. In some embodiments, the antibody or antigen-binding fragment recognizes an epitope present on the extracellular domain of a rat TREM2. In particular embodiments, the antibody or antigen-binding fragment recognizes an epitope present on the extracellular domain of a rat TREM2 in SEQ ID NO:2765. In some embodiments, the antibody or antigen-binding fragment recognizes an epitope present on the extracellular domain of a rabbit TREM2. In particular embodiments, the antibody or antigen-binding fragment recognizes an epitope present on the extracellular domain of a rabbit TREM2 in SEQ ID NO:2766. In some embodiments, the antibody or antigen-binding fragment recognizes an epitope present on the extracellular domain of a cynomolgus monkey TREM2. In particular embodiments, the antibody or antigen-binding fragment recognizes an epitope present on the extracellular domain of a cynomolgus monkey TREM2 in SEQ ID NO:2767.

[0663] In some embodiments, the antibody is an antibody having a VL, VH, full heavy chain sequence, full light chain sequence, a CDR sequence, or a full sequence disclosed in the “SEQUENCE” Table of PCT Patent Application Publication No. WO2021101823A1, which are reproduced below as TABLE M1.

TABLE M1

| Description | Sequence |
|---|---|
| ′823 Antibody 1 CDR-H1 | GFSFNTYWIG (SEQ ID NO: 2753) |
| ′823 Antibody 1 CDR-H2 | IIYPGDQDIRYSPSFQG (SEQ ID NO: 2754) |
| ′823 Antibody 1 CDR-H3 | ARYGRYIYGYGGYHGMDV (SEQ ID NO: 2755) |
| ′823 Antibody 1 CDR-L1 | RASQAIRDDLG (SEQ ID NO: 2756) |
| ′823 Antibody 1 CDR-L2 | YAASSLQS (SEQ ID NO: 2757 |
| ′823 Antibody 1 CDR-L3 | LQNYNYPHT (SEQ ID NO: 2758) |
| ′823 Antibody 1 VH | EVQLVQSGAEVKKPGESLKISCKGSGFSFNTYWIGWVRQMPG |
| | KGLEWMGIIYPGDQDIRYSPSFQGQVTISADKSISTAYLQWSSL |
| | KASDTAMYYCARYGRYIYGYGGYHGMDVWGQGTTVTVSS |
| | (SEQ ID NO: 2759) |
| ′823 Antibody 1 VL | DIQMTQSPSSLSASVGDRVTITCRASQAIRDDLGWYQQKPGKA |
| | PKLLIYAASSLQSGVPSRFSGSGSGTDFTLTISSLQPEDFATYYC |
| | LQNYNYPHTFGQGTKLEIK (SEQ ID NO: 2760) |
| ′823 Antibody 1 Heavy | EVQLVQSGAEVKKPGESLKISCKGSGFSFNTYWIGWVRQMPG |
| Chain | KGLEWMGIIYPGDQDIRYSPSFQGQVTISADKSISTAYLQWSSL |
| | KASDTAMYYCARYGRYIYGYGGYHGMDVWGQGTTVTVSSA |
| | STKGPSVFPLAPCSRSTSESTAALGCLVKDYFPEPVTVSWNSG |
| | ALTSGVHTFPAVLQSSGLYSLSSVVTVPSSSLGTKTYTCNVDH |
| | KPSNTKVDKRVESKYGPPCPPCPAPEAAGGPSVFLFPPKPKDT |
| | LMISRTPEVTCVVVDVSQEDPEVQFNWYVDGVEVHNAKTKP |
| | REEQFNSTYRVVSVLTVLHQDWLNGKEYKCKVSNKGLPSSIE |
| | KTISKAKGQPREPQVYTLPP SQEEMTKNQVSLTCLVKGFYPSD |
| | IAVEWESNGQPENNYKTTPPVLDSDGSFFLYSRLTVDKSRWQE |
| | GNVFSCSVMHEALHNHYTQKSLSLSLG (SEQ ID NO: 2761) |
| ′823 Antibody 1 Light Chain | DIQMTQSPSSLSASVGDRVTITCRASQAIRDDLGWYQQKPGKA |
| | PKLLIYAASSLQSGVPSRFSGSGSGTDFTLTISSLQPEDFATYYC |
| | LQNYNYPHTFGQGTKLEIKRTVAAPSVFIFPPSDEQLKSGTASV |
| | VCLLNNFYPREAKVQWKVDNALQSGNSQESVTEQDSKDSTYS |
| | LSSTLTLSKADYEKHKVYACEVTHQGLSSPVTKSFNRGEC |
| | (SEQ ID NO: 2762) |
| Human TREM2 ECD-His | HNTTVFQGVAGQSLQVSCPYDSMKHWGRRKAWCRQLGEKG |
| | PCQRVVSTHNLWLLSFLRRWNGSTAITDDTLGGTLTITLRNLQ |
| | PHDAGLYQCQSLHGSEADTLRKVLVEVLADPLDHRDAGDLW |
| | FPGESESFEDAHVEHSISRSLLEGEIPFPPTSHHHHHH |
| | (SEQ ID NO: 2763) |
| Mouse TREM2 ECD-His | LNTTVLQGMAGQSLRVSCTYDALKHWGRRKAWCRQLGEEG |
| | PCQRVVSTHGVWLLAFLKKRNGSTVIADDTLAGTVTITLKNL |
| | QAGDAGLYQCQSLRGREAEVLQKVLVEVLEDPLDDQDAGDL |
| | WVPEESS SFEGAQVEHSTSRNQETSFPPTSHHHHHH |
| | (SEQ ID NO: 2764) |
| Rat TREM2 ECD-His | NTTVFQGVAGQSLRVSCPYDSATHWGRRKAWCRQLGEEGPC |
| | ERVVSTHSWWLLSFLKRRNGSTAITDDALGGTLTVTLRDLQA |
| | QDAGVYQCQSLQGREASTLQKILVEVLTEPLEHEHAGDFWVP |
| | EESGSFEDPPVERSSSRSPSEGEPSFPPASGGGGQHHHHHH |
| | (SEQ ID NO: 2765) |
| Rabbit TREM2 ECD-His | NTTVLQGVAGQSLRVSCTYDALRHWGRRKAWCRQLAEEGPC |
| | QRVVSTHGVWLLAFLRKQNGSTVITDDTLAGTVTITLRNLQA |
| | GDAGLYQCQSLRGREAEVLQKVVVEVLEDPLDDQDAGDLWV |
| | PEESESFEGAQVEHSTSRSQSGGGGQHHHHHH |
| | (SEQ ID NO: 2766) |
| Cynomolgus monkey | HNTTVFQGVEGQSLQVSCPYDSMKHWGRRKAWCRQLGEKGP |
| TREM2 ECD-His | CQRVVSTHNLWLLSFLRRRNGSTAITDDTLGGTLTITLRNLQPH |
| | DAGFYQCQSLHGSEADTLRKVLVEVLADPLDHRDAGDLWVP |
| | GESESFEDAHVEHSISRPSQGSHLPSCLSKEGGGGQHHHHHH |
| | (SEQ ID NO: 2767) |

[0664] In some embodiments, each of the light chain variable regions and each of the heavy chain variable regions disclosed in TABLE M1 as well as specific combinations thereof and other embodiments of the anti-TREM2 antibody described in the '823 application and herein may be attached to the light chain constant regions (TABLE EN1) and heavy chain constant regions (TABLE EN2) to form complete antibody light and heavy chains, respectively, as further discussed below. Further, each of the generated heavy and light chain sequences may be combined to form a complete antibody structure. It should be understood that the heavy chain and light chain variable regions provided herein can also be attached to other constant domains having different sequences than the exemplary sequences listed herein.

### Exemplary Anti-TREM2 Antibodies

[0665] In some embodiments, the TREM2 agonist antigen binding protein comprises a CDRL1 or a variant thereof having one, two, three or four amino acid substitutions; a CDRL2, or a variant thereof having one, two, three or four amino acid substitutions; a CDRL3, or a variant thereof having one, two, three or four amino acid substitutions; a CDRH1, or a variant thereof having one, two, three or four amino acid substitutions; a CDRH2, or a variant thereof having one, two, three or four amino acid substitutions; and a CDRH3, or a variant thereof having one, two, three or four amino acid substitutions, where the amino acid sequences of the CDRL1, CDRL2, CDRL3, CDRH1, CDRH2, and CDRH3 are provided in TABLES EX1 and EX2 below, along with exemplary light chain and variable regions.

TABLE EX1
Exemplary Anti-TREM2 Antibody Light Chain Variable Regions

| VL Amino Acid Sequence | CDRL1 | CDRL2 | CDRL3 |
|---|---|---|---|
| EIVMTQSPATLSVSPGERATLSCR | RASQSVSSNLA | GASTRAT | LQDNNFPPT |
| ASQSVSSNLAWFQQKPGQAPRLL | (SEQ ID NO: 10) | (SEQ ID NO: 23) | (SEQ ID NO: 372) |
| IYGASTRATGIPARFSGSGSGTEF | | | |
| TLTISSLQPEDFAVYYCLQDNNFP | | | |
| PTFGQGTKVDIK (SEQ ID NO: 330) | | | |

TABLE EX2
Exemplary Anti-TREM2 Antibody Heavy Chain Variable Regions

| VH Amino Acid Sequence | CDRH1 | CDRH2 | CDRH3 |
|---|---|---|---|
| EVQLVQSGAEVKKPGESLKIS | SWIG | IIYPGDADARYSPSF | RRQGIFGDALDF |
| CKGSGYSFTSYWIGWVRQMP | (SEQ ID NO: 81) | QG (SEQ ID NO: 373) | (SEQ ID NO: 374) |
| GKGLEWMGIIYPGDADARYS | | | |
| PSFQGQVTISADKSISTAYLQ | | | |
| WSSLKASDTAMYFCARRRQ | | | |
| GIFGDALDFWGQGTLVTVSS | | | |
| (SEQ ID NO: 331) | | | |

[0666] As noted above, anti-TREM2 antibodies may comprise one or more of the CDRs presented in TABLE EX1 (light chain CDRs; i.e. CDRLs) and TABLE EX2 (heavy chain CDRs, i.e. CDRHs).

[0667] In some embodiments, an anti-TREM2 antibody comprises a light chain comprising a CDRL1 having an amino acid sequence according to SEQ ID NO:10, a CDRL2 having an amino acid sequence according to SEQ ID NO:23, a CDRL3 having an amino acid sequence according to SEQ ID NO:372, or any CDRL1, CDRL2, or CDRL3 amino acid sequence that contains one or more, e.g., one, two, three, four or more amino acid substitutions (e.g., conservative amino acid substitutions), deletions or insertions of no more than five, four, three, two, or one amino acids to any of SEQ ID NOS: 10, 23, and 372. Such substitutions, deletions, and insertions would retain significant anti-TREM2 binding activity In these and other embodiments, an anti-TREM2 antibody comprises a CDRH1 having an amino acid sequence according to SEQ ID NO:81, a CDRH2 having an amino acid sequence according to SEQ ID NO:373, a CDRH3 having an amino acid sequence according to SEQ ID NO:374, or any CDRH1, CDRH2, or CDRH3 having an amino acid sequence that contains one or more, e.g., one, two, three, four or more amino acid substitutions (e.g., conservative amino acid substitutions), deletions or insertions of no more than five, four, three, two, or one amino acids to any of SEQ ID NOS:81, 373, and 374. Such substitutions, deletions, and insertions would retain significant anti-TREM2 binding activity

[0668] In some embodiments, an anti-TREM2 antibody comprises a light chain variable region comprising a CDRL1 having an amino acid sequence according to SEQ ID NO: 10; a CDRL2 having an amino acid sequence according to SEQ ID NO:23; and a CDRL3 having an amino acid sequence according to SEQ ID NO:372, and a heavy chain variable region comprising a CDRH1 having an amino acid sequence according to SEQ ID NO:81; a CDRH2 having an amino acid sequence according to SEQ ID NO:373; and a CDRH3 having an amino acid sequence according to SEQ ID NO:374.

[0669] In some embodiments, an anti-TREM2 antibody comprises a light chain variable region having an amino acid sequence according to SEQ ID NO:330, or any amino acid sequence that contains one or more, e.g., one, two, three, four or more amino acid substitutions (e.g., conservative amino acid substitutions), deletions or insertions of no more than five, four, three, two, or one amino acids to SEQ ID NO:330. Such substitutions, deletions, and insertions would retain significant anti-TREM2 binding activity. In some embodiments, an anti-TREM2 antibody comprises a heavy chain variable region having an amino acid sequence according to SEQ ID NO:331, or any amino acid sequence that contains one or more, e.g., one, two, three, four or more amino acid substitutions (e.g., conservative amino acid substitutions), deletions or insertions of no more than five, four, three, two, or one amino acids to SEQ ID NO:331. Such substitutions, deletions, and insertions would retain significant anti-TREM2 binding activity.

[0670] In specific embodiments, an anti-TREM2 antibody comprises a light chain variable region having an amino acid sequence according to SEQ ID NO:330, and a heavy chain variable region having an amino acid sequence according to SEQ ID NO:331.

[0671] In some embodiments, an anti-TREM2 antibody comprises a heavy chain amino acid sequence, and/or a light chain amino acid sequence selected from TABLE EX3. TABLE EX3 shows exemplary anti-TREM2 antibody heavy and light chains for exemplary antibodies “Ab-1”, “Ab-2”, and “Ab-3”.

TABLE EX3
Exemplary Anti-TREM2 Antibody Heavy and Light Chains

| Chain | Description | Amino Acid Sequence |
|---|---|---|
| Light | Ab-1 | EIVMTQSPATLSVSPGERATLSCRASQSVSSNLAWFQQKPGQAPRLLI |
| Chain | | YGASTRATGIPARFSGSGSGTEFTLTISSLQPEDFAVYYCLQDNNFPPT |
| | | FGQGTKVDIKRTVAAPSVFIFPPSDEQLKSGTASVVCLLNNFYPREAK |
| | | VQWKVDNALQSGNSQESVTEQDSKDSTYSLSSTLTLSKADYEKHKV |
| | | YACEVTHQGLSSPVTKSFNRGEC (SEQ ID NO: 2777) |
| | Ab-1 w/ | MDMRVPAQLLGLLLLWLRGARCEIVMTQSPATLSVSPGERATLSCR |
| | leader | ASQSVSSNLAWFQQKPGQAPRLLIYGASTRATGIPARFSGSGSGTEFT |
| | sequence | LTISSLQPEDFAVYYCLQDNNFPPTFGQGTKVDIKRTVAAPSVFIFPPS |
| | | DEQLKSGTASVVCLLNNFYPREAKVQWKVDNALQSGNSQESVTEQ |
| | | DSKDSTYSLSSTLTLSKADYEKHKVYACEVTHQGLSSPVTKSFNRGE |
| | | C (SEQ ID NO: 339) |
| | Ab-2 | EIVMTQSPATLSVSPGERATLSCRASQSVSSNLAWFQQKPGQAPRLLI |
| | | YGASTRATGIPARFSGSGSGTEFTLTISSLQPEDFAVYYCLQDNNFPPT |
| | | FGQGTKVDIKRADAAPTVSIFPPSSEQLTSGGASVVCFLNNFYPKDIN |
| | | VKWKIDGSERQNGVLNSWTDQDSKDSTYSMSSTLTLTKDEYERHNS |
| | | YTCEATHKTSTSPIVKSFNRNEC (SEQ ID NO: 2780) |
| | Ab-3 | EIVMTQSPATLSVSPGERATLSCRASQSVSSNLAWFQQKPGQAPRLLI |
| | | YGASTRATGIPARFSGSGSGTEFTLTISSLQPEDFAVYYCLQDNNFPPT |
| | | FGQGTKVDIKRADAAPTVSIFPPSSEQLTSGGASVVCFLNNFYPKDIN |
| | | VKWKIDGSERQNGVLNSWTDQDSKDSTYSMSSTLTLTKDEYERHNS |
| | | YTCEATHKTSTSPIVKSFNRNEC (SEQ ID NO: 2780) |
| Heavy | Ab-1 | EVQLVQSGAEVKKPGESLKISCKGSGYSFTSYWIGWVRQMPGKGLE |
| Chain | | WMGIIYPGDADARYSPSFQGQVTISADKSISTAYLQWSSLKASDTAM |
| | | YFCARRRQGIFGDALDFWGQGTLVTVSSASTKGPSVFPLAPSSKSTS |
| | | GGTAALGCLVKDYFPEPVTVSWNSGALTSGVHTFPAVLQSSGLYSLS |
| | | SVVTVPSSSLGTQTYICNVNHKPSNTKVDKKVEPKSCDKTHTCPPCP |
| | | APELLGGPSVFLFPPKPKDTLMISRTPEVTCVVVDVSHEDPEVKFNW |
| | | YVDGVEVHNAKTKPCEEQYGSTYRCVSVLTVLHQDWLNGKEYKCK |
| | | VSNKALPAPIEKTISKAKGQPREPQVYTLPPSREEMTKNQVSLTCLVK |
| | | GFYPSDIAVEWESNGQPENNYKTTPPVLDSDGSFFLYSKLTVDKSRW |
| | | QQGNVFSCSVMHEALHNHYTQKSLSLSPGK (SEQ ID NO: 2774) |
| | Ab-1 w/ | MDMRVPAQLLGLLLLWLRGARCEVQLVQSGAEVKKPGESLKISCK |
| | leader | GSGYSFTSYWIGWVRQMPGKGLEWMGITYPGDADARYSPSFQGQVT |
| | sequence | ISADKSISTAYLQWSSLKASDTAMYFCARRRQGIFGDALDFWGQGTL |
| | | VTVSSASTKGPSVFPLAPSSKSTSGGTAALGCLVKDYFPEPVTVSWN |
| | | SGALTSGVHTFPAVLQSSGLYSLSSVVTVPSSSLGTQTYICNVNHKPS |
| | | NTKVDKKVEPKSCDKTHTCPPCPAPELLGGPSVFLFPPKPKDTLMISR |
| | | TPEVTCVVVDVSHEDPEVKFNWYVDGVEVHNAKTKPCEEQYGSTY |
| | | RCVSVLTVLHQDWLNGKEYKCKVSNKALPAPIEKTISKAKGQPREP |
| | | QVYTLPPSREEMTKNQVSLTCLVKGFYPSDIAVEWESNGQPENNYK |
| | | TTPPVLDSDGSFFLYSKLTVDKSRWQQGNVFSCSVMHEALHNHYTQ |
| | | KSLSLSPGK (SEQ ID NO: 340) |
| | Ab-2 | EVQLVQSGAEVKKPGESLKISCKGSGYSFTSYWIGWVRQMPGKGLE |
| | | WMGIIYPGDADARYSPSFQGQVTISADKSISTAYLQWSSLKASDTAM |
| | | YFCARRRQGIFGDALDFWGQGTLVTVSSAKTTPPSVYPLAPGSAAQT |
| | | NSMVTLGCLVKGYFPEPVTVTWNSGSLSSGVHTFPAVLQSDLYTLSS |
| | | SVTVPSSPRPSETVTCNVAHPASSTKVDKKIVPRDCGCKPCICTVPEV |
| | | SSVFIFPPKPKDVLTITLTPKVTCVVVDISKDDPEVQFSWFVDDVEVH |
| | | TAQTQPREEQFNSTFRSVSELPIMHQDWLNGKEFKCRVNSAAFPAPI |
| | | EKTISKTKGRPKAPQVYTIPPPKEQMAKDKVSLTCMITDFFPEDITVE |
| | | WQWNGQPAENYKNTQPIMNTNGSYFVYSKLNVQKSNWEAGNTFT |
| | | CSVLHEGLHNHHTEKSLSHSPGK (SEQ ID NO: 2781) |
| | Ab-3 | EVQLVQSGAEVKKPGESLKISCKGSGYSFTSYWIGWVRQMPGKGLE |
| | | WMGIIYPGDADARYSPSFQGQVTISADKSISTAYLQWSSLKASDTAM |
| | | YFCARRRQGIFGDALDFWGQGTLVTVSSAKTTPPSVYPLAPGSAAQT |
| | | NSMVTLGCLVKGYFPEPVTVTWNSGSLSSGVHTFPAVLQSDLYTLSS |
| | | SVTVPSSTWPSETVTCNVAHPASSTKVDKKIVPRDCGCKPCICTVPEV |
| | | SSVFIFPPKPKDVLTITLTPKVTCVVVDISKDDPEVQFSWFVDDVEVH |
| | | TAQTQPREEQFGSTFRSVSELPIMHQDWLNGKEFKCRVNSAAFPAPI |
| | | EKTISKTKGRPKAPQVYTIPPPKEQMAKDKVSLTCMITDFFPEDITVE |
| | | WQWNGQPAENYKNTQPIMDTDGSYFVYSKLNVQKSNWEAGNTFT |
| | | CSVLHEGLHNHHTEKSLSHSPGK (SEQ ID NO: 2779) |

[0672] In some embodiments, an anti-TREM2 antibody comprises a light chain having an amino acid sequence according to any one of SEQ ID NOS:2777, 339, and 2780, or any amino acid sequence that contains one or more, e.g., one, two, three, four or more amino acid substitutions (e.g., conservative amino acid substitutions), deletions or insertions of no more than five, four, three, two, or one amino acids to any one of SEQ ID NOS:2777, 339, and 2780. Such substitutions, deletions, and insertions would retain significant anti-TREM2 binding activity. In these and other embodiments, an anti-TREM2 antibody comprises a heavy chain having an amino acid sequence according to any one of SEQ ID NOS:2774, 340, 2779, and 2781, or any amino acid sequence that contains one or more, e.g., one, two, three, four or more amino acid substitutions (e.g., conservative amino acid substitutions), deletions or insertions of no more than five, four, three, two, or one amino acids to any one of SEQ ID NOS:2774, 340, 2779, and 2781. Such substitutions, deletions, and insertions would retain significant anti-TREM2 binding activity.

[0673] In some embodiments, an anti-TREM2 antibody comprises a light chain having an amino acid sequence according to SEQ ID NO:2777, and a heavy chain variable region having an amino acid sequence according to SEQ ID NO:2774. In some embodiments, an anti-TREM2 antibody comprises a light chain having an amino acid sequence according to SEQ ID NO:339, and a heavy chain variable region having an amino acid sequence according to SEQ ID NO:340. In some embodiments, an anti-TREM2 antibody comprises a light chain having an amino acid sequence according to SEQ ID NO:2780, and a heavy chain variable region having an amino acid sequence according to SEQ ID NO:2781. In some embodiments, an anti-TREM2 antibody comprises a light chain having an amino acid sequence according to SEQ ID NO:2780, and a heavy chain variable region having an amino acid sequence according to SEQ ID NO:2779.

### Antibody Constant Domains and Engineered Constant Regions

[0674] In some embodiments, any of the antigen binding agents, can have a constant domain on the light chain and/or the heavy chain of any origin. The term “constant region” as used herein refers to all domains of an antibody other than the variable region. The constant domain can be that of rodent, primate or other mammals. In some embodiments, the constant domain is of human origin. Accordingly, in some embodiments, any of the antigen binding agents described herein can have a human constant region, some of which are described above.

[0675] In some embodiments, a human constant region is, for example, a human light chain constant region or a human constant heavy chain region.

[0676] The term “light chain” or “immunoglobulin light chain” refers to a polypeptide comprising, from amino terminus to carboxyl terminus, a single immunoglobulin light chain variable region (VL) and a single immunoglobulin light chain constant domain (CL). The immunoglobulin light chain constant domain (CL) can be a human kappa (x) or human lambda (λ) constant domain.

[0677] The term “heavy chain” or “immunoglobulin heavy chain” refers to a polypeptide comprising, from amino terminus to carboxyl terminus, a single immunoglobulin heavy chain variable region (VH), an immunoglobulin heavy chain constant domain 1 (CH1), an immunoglobulin hinge region, an immunoglobulin heavy chain constant domain 2 (CH2), an immunoglobulin heavy chain constant domain 3 (CH3), and optionally an immunoglobulin heavy chain constant domain 4 (CH4). Heavy chains are classified as mu (μ), delta (Δ), gamma (γ), alpha (α), and epsilon (ε), and define the antibody's isotype as IgM, IgD, IgG, IgA, and IgE, respectively. The IgG-class and IgA-class antibodies are further divided into subclasses, namely, IgG1, IgG2, IgG3, and IgG4, and IgA1 and IgA2, respectively. The heavy chains in IgG, IgA, and IgD antibodies have three domains (CH1, CH2, and CH3), whereas the heavy chains in IgM and IgE antibodies have four domains (CH1, CH2, CH3, and CH4). The immunoglobulin heavy chain constant domains can be from any immunoglobulin isotype, including subtypes. The antibody chains are linked together via inter-polypeptide disulfide bonds between the CL domain and the CH1 domain (i.e. between the light and heavy chain) and between the hinge regions of the antibody heavy chains.

[0678] In some embodiments, the human light chain constant region comprises a human kappa or human lambda constant region. In some embodiments, the antigen binding agents based on any light chain variable region or CDRs of a light chain variable region described herein includes a human light chain constant region, such as a kappa or lambda constant region sequences, which are found in all five antibody isotypes. Examples of human immunoglobulin light chain constant region sequences are shown in the following TABLE EN1.

TABLE EN1
Exemplary Human Immunoglobulin Light Chain Constant Regions

| Designation | CL Domain Amino Acid Sequence |
|---|---|
| Human lambda v1 | GQPKANPTVTLFPPSSEELQANKATLVCLISDFYPGAVTVAWKAD |
| | GSPVKAGVETTKPSKQSNNKYAASSYLSLTPEQWKSHRSYSCQVT |
| | HEGSTVEKTVAPTECS (SEQ ID NO: 191) |
| Human lambda v2 | GQPKAAPSVTLFPPSSEELQANKATLVCLISDFYPGAVTVAWKADS |
| | SPVKAGVETTTPSKQSNNKYAASSYLSLTPEQWKSHRSYSCQVTH |
| | EGSTVEKTVAPTECS (SEQ ID NO: 192) |
| Human lambda v3 | QPKAAPSVTLFPPSSEELQANKATLVCLISDFYPGAVTVAWKADSS |
| | PVKAGVETTTPSKQSNNKYAASSYLSLTPEQWKSHRSYSCQVTHE |
| | GSTVEKTVAPTECS (SEQ ID NO: 193) |
| Human lambda v4 | GQPKAAPSVTLFPPSSEELQANKATLVCLISDFYPGAVTVAWKADS |
| | SPVKAGVETTTPSKQSNNKYAASSYLSLTPEQWKSHKSYSCQVTH |
| | EGSTVEKTVAPTECS (SEQ ID NO: 194) |
| Human lambda v5 | GQPKAAPSVTLFPPSSEELQANKATLVCLVSDFYPGAVTVAWKAD |
| | GSPVKVGVETTKPSKQSNNKYAASSYLSLTPEQWKSHRSYSCRVT |
| | HEGSTVEKTVAPAECS (SEQ ID NO: 195) |
| Human kappa v1 | TVAAPSVFIFPPSDEQLKSGTASVVCLLNNFYPREAKVQWKVDNA |
| | LQSGNSQESVTEQDSKDSTYSLSSTLTLSKADYEKHKVYACEVTH |
| | QGLSSPVTKSFNRGEC (SEQ ID NO: 196) |
| Human kappa v2 | RTVAAPSVFIFPPSDEQLKSGTASVVCLLNNFYPREAKVQWKVDN |
| | ALQSGNSQESVTEQDSKDSTYSLSSTLTLSKADYEKHKVYACEVT |
| | HQGLSSPVTKSFNRGEC (SEQ ID NO: 197) |

[0679] In some embodiments, a human constant region comprises at least one or all of the following: a human CH1, human Hinge, human CH2, and CH3 domain. In some embodiments, the heavy chain constant region comprises an Fc region, where the Fc portion is a human IgG₁, IgG₂, IgG₃, IgG₄ or IgM isotype. The term “Fe region” refers to the C-terminal region of an immunoglobulin heavy chain which may be generated by papain digestion of an intact antibody. The Fc region of an immunoglobulin generally comprises two constant domains, a CH2 domain and a CH3 domain, and optionally comprises a CH4 domain. In certain embodiments, the Fc region is an Fc region from an IgG1, IgG2, IgG3, or IgG4 immunoglobulin. In some embodiments, the Fc region comprises CH2 and CH3 domains from a human IgG1 or human IgG2 immunoglobulin. The Fc region may retain effector function, such as C1q binding, complement-dependent cytotoxicity (CDC), Fc receptor binding, antibody-dependent cell-mediated cytotoxicity (ADCC), and phagocytosis. In other embodiments, the Fc region may be modified to reduce or eliminate effector function as described in further detail below.

[0680] In some embodiments, the antigen binding agents based on any heavy chain variable region or CDRs of a heavy chain variable region described herein includes a human heavy chain constant region., for example a human constant region comprising at least one or all of a human CH1, human Hinge, human CH2, and CH3 domain. In some embodiments, the antigen binding agents based on any heavy chain variable region or CDRs of a heavy chain variable region described herein includes an Fc region, where the Fc region is a human IgG₁, IgG₂, IgG₃, IgG₄ or IgM isotype. Examples of human IgG1, IgG2, and IgG4 heavy chain constant region sequences are shown below in TABLE EN2.

TABLE EN2
Exemplary Human Immunoglobulin Heavy Chain Constant Regions

| Ig isotype | Heavy Chain Constant Region Amino Acid Sequence |
|---|---|
| Human IgG1z | ASTKGPSVFPLAPSSKSTSGGTAALGCLVKDYFPEPVTVSWNSGALT |
| | SGVHTFPAVLQSSGLYSLSSVVTVPSSSLGTQTYICNVNHKPSNTKV |
| | DKKVEPKSCDKTHTCPPCPAPELLGGPSVFLFPPKPKDTLMISRTPEV |
| | TCVVVDVSHEDPEVKFNWYVDGVEVHNAKTKPREEQYNSTYRVV |
| | SVLTVLHQDWLNGKEYKCKVSNKALPAPIEKTISKAKGQPREPQVY |
| | TLPPSREEMTKNQVSLTCLVKGFYPSDIAVEWESNGQPENNYKTTP |
| | PVLDSDGSFFLYSKLTVDKSRWQQGNVFSCSVMHEALHNHYTQKS |
| | LSLSPGK (SESQ ID NO: 198) |
| Human IgG1za | ASTKGPSVFPLAPSSKSTSGGTAALGCLVKDYFPEPVTVSWNSGALT |
| | SGVHTFPAVLQSSGLYSLSSVVTVPSSSLGTQTYICNVNHKPSNTKV |
| | DKKVEPKSCDKTHTCPPCPAPELLGGPSVFLFPPKPKDTLMISRTPEV |
| | TCVVVDVSHEDPEVKFNWYVDGVEVHNAKTKPREEQYNSTYRVV |
| | SVLTVLHQDWLNGKEYKCKVSNKALPAPIEKTISKAKGQPREPQVY |
| | TLPPSRDELTKNQVSLTCLVKGFYPSDIAVEWESNGQPENNYKTTPP |
| | VLDSDGSFFLYSKLTVDKSRWQQGNVFSCSVMHEALHNHYTQKSL |
| | SLSPGK (SESQ ID NO: 199) |
| Human IgG1f | ASTKGPSVFPLAPSSKSTSGGTAALGCLVKDYFPEPVTVSWNSGALT |
| | SGVHTFPAVLQSSGLYSLSSVVTVPSSSLGTQTYICNVNHKPSNTKV |
| | DKRVEPKSCDKTHTCPPCPAPELLGGPSVFLFPPKPKDTLMISRTPEV |
| | TCVVVDVSHEDPEVKFNWYVDGVEVHNAKTKPREEQYNSTYRVV |
| | SVLTVLHQDWLNGKEYKCKVSNKALPAPIEKTISKAKGQPREPQVY |
| | TLPPSREEMTKNQVSLTCLVKGFYPSDIAVEWESNGQPENNYKTTP |
| | PVLDSDGSFFLYSKLTVDKSRWQQGNVFSCSVMHEALHNHYTQKS |
| | LSLSPGK (SESQ ID NO: 200) |
| Human IgG1fa | ASTKGPSVFPLAPSSKSTSGGTAALGCLVKDYFPEPVTVSWNSGALT |
| | SGVHTFPAVLQSSGLYSLSSVVTVPSSSLGTQTYICNVNHKPSNTKV |
| | DKRVEPKSCDKTHTCPPCPAPELLGGPSVFLFPPKPKDTLMISRTPEV |
| | TCVVVDVSHEDPEVKFNWYVDGVEVHNAKTKPREEQYNSTYRVV |
| | SVLTVLHQDWLNGKEYKCKVSNKALPAPIEKTISKAKGQPREPQVY |
| | TLPPSRDELTKNQVSLTCLVKGFYPSDIAVEWESNGQPENNYKTTPP |
| | VLDSDGSFFLYSKLTVDKSRWQQGNVFSCSVMHEALHNHYTQKSL |
| | SLSPGK (SESQ ID NO: 201) |
| Human IgG1z | ASTKGPSVFPLAPSSKSTSGGTAALGCLVKDYFPEPVTVSWNSGALT |
| aglycosylated | SGVHTFPAVLQSSGLYSLSSVVTVPSSSLGTQTYICNVNHKPSNTKV |
| v1 | DKKVEPKSCDKTHTCPPCPAPELLGGPSVFLFPPKPKDTLMISRTPEV |
| | TCVVVDVSHEDPEVKFNWYVDGVEVHNAKTKPREEQYGSTYRVV |
| | SVLTVLHQDWLNGKEYKCKVSNKALPAPIEKTISKAKGQPREPQVY |
| | TLPPSREEMTKNQVSLTCLVKGFYPSDIAVEWESNGQPENNYKTTP |
| | PVLDSDGSFFLYSKLTVDKSRWQQGNVFSCSVMHEALHNHYTQKS |
| | LSLSPGK (SESQ ID NO: 202) |
| Human IgG1z | ASTKGPSVFPLAPSSKSTSGGTAALGCLVKDYFPEPVTVSWNSGALT |
| aglycosylated v2 | SGVHTFPAVLQSSGLYSLSSVVTVPSSSLGTQTYICNVNHKPSNTKV |
| | DKKVEPKSCDKTHTCPPCPAPELLGGPSVFLFPPKPKDTLMISRTPEV |
| | TCVVVDVSHEDPEVKFNWYVDGVEVHNAKTKPCEEQYGSTYRCV |
| | SVLTVLHQDWLNGKEYKCKVSNKALPAPIEKTISKAKGQPREPQVY |
| | TLPPSREEMTKNQVSLTCLVKGFYPSDIAVEWESNGQPENNYKTTP |
| | PVLD SDGSFFLYSKLTVDKSRWQQGNVFSCSVMHEALHNHYTQKS |
| | LSLSPGK (SESQ ID NO: 203) |
| Human IgG2 | ASTKGPSVFPLAPCSRSTSESTAALGCLVKDYFPEPVTVSWNSGALT |
| | SGVHTFPAVLQSSGLYSLSSVVTVPSSNFGTQTYTCNVDHKPSNTK |
| | VDKTVERKCCVECPPCPAPPVAGPSVFLFPPKPKDTLMISRTPEVTC |
| | VVVDVSHEDPEVQFNWYVDGVEVHNAKTKPREEQFNSTFRVVSVL |
| | TVVHQDWLNGKEYKCKVSNKGLPAPIEKTISKTKGQPREPQVYTLP |
| | PSREEMTKNQVSLTCLVKGFYPSDIAVEWESNGQPENNYKTTPPML |
| | DSDGSFFLYSKLTVDKSRWQQGNVFSCSVMHEALHNHYTQKSLSL |
| | SPGK (SESQ ID NO: 204) |
| Human IgG4 | ASTKGPSVFPLAPSSKSTSGGTAALGCLVKDYFPEPVTVSWNSGALT |
| | SGVHTFPAVLQSSGLYSLSSVVTVPSSSLGTQTYICNVNHKPSNTKV |
| | DKKVEPKSCDKTHTCPPCPAPELLGGPSVFLFPPKPKDTLMISRTPEV |
| | TCVVVDVSHEDPEVKFNWYVDGVEVHNAKTKPCEEQYGSTYRCV |
| | SVLTVLHQDWLNGKEYKCKVSNKALPAPIEKTISKAKGQPREPQVY |
| | TLPPSREEMTKNQVSLTCLVKGFYPSDIAVEWESNGQPENNYKTTP |
| | PVLDSDGSFFLYSKLTVDKSRWQQGNVFSCSVMHEALHNHYTQKS |
| | LSLSPGK (SESQ ID NO: 205) |

[0681] In some embodiments, the heavy chain constant region, particularly the Fc region, is an engineered heavy chain constant region. In some embodiments, the antigen binding proteins, e.g. monoclonal antibodies, comprise one or more amino acid substitutions in the Fc region to enhance effector function, including ADCC activity, CDC activity, ADCP activity, and/or the clearance or half-life of the antigen binding protein. Exemplary amino acid substitutions (according to EU numbering scheme) that can enhance effector function include, but are not limited to, E233L, L234I, L234Y, L235S, G236A, S239D, F243L, F243V, P2471, D280H, K290S, K290E, K290N, K290Y, R292P, E294L, Y296W, S298A, S298D, S298V, S298G, S298T, T299A, Y300L, V3051, Q31 iM, K326A, K326E, K326W, A330S, A330L, A330M, A330F, 1332E, D333A, E333S, E333A, K334A, K334V, A339D, A339Q, P396L, or combinations of any of the foregoing.

[0682] In some embodiments, the TREM2 antigen binding proteins (e.g. monoclonal antibodies) comprise one or more amino acid substitutions in a heavy chain constant region to reduce effector function. Exemplary amino acid substitutions (according to EU numbering scheme) that can reduce effector function include, but are not limited to, C220S, C226S, C229S, E233P, L234A, L234V, V234A, L234F, L235A, L235E, G237A, P238S, S267E, H268Q, N297A, N297G, N297Q, V309L, E318A, L328F, A330S, A331S, P331S or combinations of any of the foregoing.

[0683] In some embodiments, the TREM2 agonist antigen binding proteins comprise one or more amino acid substitutions that affect the level or type of glycosylation of the binding proteins. Glycosylation can contribute to the effector function of antibodies, particularly IgG1 antibodies. Glycosylation of polypeptides is typically either N-linked or O-linked. N-linked refers to the attachment of the carbohydrate moiety to the side chain of an asparagine residue. The tri-peptide sequences asparagine-X-serine and asparagine-X-threonine, where X is any amino acid except proline, are the recognition sequences for enzymatic attachment of the carbohydrate moiety to the asparagine side chain. Thus, the presence of either of these tri-peptide sequences in a polypeptide creates a potential glycosylation site. 0-linked glycosylation refers to the attachment of one of the sugars N-acetylgalactosamine, galactose, or xylose, to a hydroxyamino acid, most commonly serine or threonine, although 5-hydroxyproline or 5-hydroxylysine may also be used.

[0684] In some embodiments, glycosylation of the TREM2 agonist antigen binding proteins described herein is increased by adding one or more glycosylation sites, e.g., to the Fc region of the binding protein. Addition of glycosylation sites to the antigen binding protein can be conveniently accomplished by altering the amino acid sequence such that it contains one or more of the above-described tri-peptide sequences (for N-linked glycosylation sites). The alteration may also be made by the addition of, or substitution by, one or more serine or threonine residues to the starting sequence (for O-linked glycosylation sites). For ease, the antigen binding protein amino acid sequence may be altered through changes at the DNA level, particularly by mutating the DNA encoding the target polypeptide at preselected bases such that codons are generated that will translate into the desired amino acids.

[0685] The invention also encompasses production of TREM2 antigen binding protein molecules with altered carbohydrate structure resulting in altered effector activity, including antigen binding proteins with absent or reduced fucosylation that exhibit improved ADCC activity. Various methods are known in the art to reduce or eliminate fucosylation. For example, ADCC effector activity is mediated by binding of the antibody molecule to the FcγRIII receptor, which has been shown to be dependent on the carbohydrate structure of the N-linked glycosylation at the N297 residue of the CH2 domain. Non-fucosylated antibodies bind this receptor with increased affinity and trigger FcγRIII-mediated effector functions more efficiently than native, fucosylated antibodies. For example, recombinant production of non-fucosylated antibody in CHO cells in which the alpha-1,6-fucosyl transferase enzyme has been knocked out results in antibody with 100-fold increased ADCC activity (see Yamane-Ohnuki et al., Biotechnol Bioeng. 87(5):614-22, 2004). Similar effects can be accomplished through decreasing the activity of alpha-1,6-fucosyl transferase enzyme or other enzymes in the fucosylation pathway, e.g., through siRNA or antisense RNA treatment, engineering cell lines to knockout the enzyme(s), or culturing with selective glycosylation inhibitors (see Rothman et al., Mol Immunol. 26(12):1113-23, 1989). Some host cell strains, e.g. Lec13 or rat hybridoma YB2/0 cell line naturally produce antibodies with lower fucosylation levels (see Shields et al., J Biol Chem. 277(30):26733-40, 2002 and Shinkawa et al., J Biol Chem. 278(5):3466-73, 2003). An increase in the level of bisected carbohydrate, e.g. through recombinantly producing antibody in cells that overexpress GnTIII enzyme, has also been determined to increase ADCC activity (see Umana et al., Nat Biotechnol. 17(2):176-80, 1999).

[0686] In other embodiments, glycosylation of the TREM2 agonist antigen binding proteins described herein is decreased or eliminated by removing one or more glycosylation sites, e.g., from the Fc region of the binding protein. In some embodiments, the TREM2 agonist antigen binding protein is an aglycosylated human monoclonal antibody, e.g. an aglycosylated human IgG1 monoclonal antibody. Amino acid substitutions that eliminate or alter N-linked glycosylation sites can reduce or eliminate N-linked glycosylation of the antigen binding protein. In certain embodiments, the TREM2 agonist antigen binding proteins described herein comprise a mutation at position N297 (according to EU numbering scheme), such as N297Q, N297A, or N297G. In some embodiments, the TREM2 agonist antigen binding proteins of the invention comprise an Fc region from a human IgG1 antibody with a mutation at position N297. In one particular embodiment, the TREM2 agonist antigen binding proteins of the invention comprise an Fc region from a human IgG1 antibody with a N297G mutation. For instance, in some embodiments, the TREM2 agonist antigen binding proteins of the invention comprise a heavy chain constant region comprising the sequence of SEQ ID NO:202.

[0687] To improve the stability of molecules comprising a N297 mutation, the Fc region of the TREM2 agonist antigen binding proteins may be further engineered. For instance, in some embodiments, one or more amino acids in the Fc region are substituted with cysteine to promote disulfide bond formation in the dimeric state. Residues corresponding to V259, A287, R292, V302, L306, V323, or 1332 (according to EU numbering scheme) of an IgG1 Fc region may thus be substituted with cysteine. Preferably, specific pairs of residues are substituted with cysteine such that they preferentially form a disulfide bond with each other, thus limiting or preventing disulfide bond scrambling. Preferred pairs include, but are not limited to, A287C and L306C, V259C and L306C, R292C and V302C, and V323C and 1332C1n certain embodiments, the TREM2 agonist antigen binding proteins described herein comprise an Fc region from a human IgG1 antibody with mutations R292C and V302C1n such embodiments, the Fc region may also comprise a N297 mutation, such as a N297G mutation. In some embodiments, the TREM2 agonist antigen binding proteins of the invention comprise a heavy chain constant region comprising the sequence of SEQ ID NO:203.

[0688] Modifications to the hinge region and/or CH1 domain of the heavy chain and/or the constant region of the light chain of the TREM2 agonist antigen binding proteins (e.g. monoclonal antibodies) of the invention can be made to reduce or eliminate disulfide heterogeneity. Structural hetereogeneity of IgG2 antibodies has been observed where the disulfide bonds in the hinge and CH1 regions of IgG2 antibodies can be shuffled to create different structural disulfide isoforms (IgG2A, IgG2B, and IgG2A-B), which can have different levels of activity. See, e.g., Dillon et al., J. Biol. Chem., Vol. 283: 16206-16215; Martinez et al., Biochemistry, Vol. 47: 7496-7508, 2008; and White et al., Cancer Cell, Vol. 27: 138-148, 2015. Amino acid substitutions can be made in the hinge region, CH1 domain, and/or light chain constant region to promote the formation of a single disulfide isoform or lock the antigen binding protein (e.g. monoclonal antibody) into a particular disulfide isoform (e.g. IgG2A or IgG2B). Such mutations are described in WO 2009/036209 and White et al., Cancer Cell, Vol. 27: 138-148, 2015, both of which are hereby incorporated by reference in its entirety, and include C131S, C219S, and C220S (according to EU numbering scheme) mutations in the heavy chain and a C214S (according to EU numbering scheme) mutation in the light chain. In certain embodiments, the TREM2 agonist antigen binding proteins of the invention are human IgG2 anti-TREM2 agonist antibodies. In some such embodiments, the TREM2 agonist antibodies comprise a C131S mutation (according to the EU numbering scheme) in their heavy chains. In other embodiments, the TREM2 agonist antibodies comprise a C214S mutation (according to the EU numbering scheme) in their light chains and a C220S mutation (according to the EU numbering scheme) in their heavy chains. In still other embodiments, the TREM2 agonist antibodies comprise a C214S mutation (according to the EU numbering scheme) in their light chains and a C219S mutation (according to the EU numbering scheme) in their heavy chains.

[0689] In other embodiments, the TREM2 agonist antigen binding proteins of the invention are anti-TREM2 agonist antibodies comprising a CH1 region and hinge region from a human IgG2 antibody and an Fc region from a human IgG1 antibody. The unique arrangement of the disulfide bonds in the hinge region of IgG2 antibodies has been reported to impart enhanced stimulatory activity for certain anticancer antibodies (White et al., Cancer Cell, Vol. 27: 138-148, 2015). This enhanced activity could be transferred to IgG1-type antibodies by exchanging the CH1 and hinge regions of the IgG1 antibody for those in the IgG2 antibody (White et al., 2015). The IgG2 hinge region includes the amino acid sequence ERKCCVECPPCP (SEQ ID NO:206). The amino acid sequence of the CH1 and hinge regions from a human IgG2 antibody may comprise the following amino acid sequence:

(SEQ ID NO: 207)
ASTKGPSVFP LAPCSRSTSE STAALGCLVK DYFPEPVTVS
WNSGALTSGV HTFPAVLQSS GLYSLSSVVT VPSSNFGTQT
YTCNVDHKPS NTKVDKTVER KCCVECPPCP.

[0690] In some embodiments, the antigen binding agents based on any heavy chain variable region or CThus, in some embodiments, the anti-TREM2 agonist antibodies comprise the sequence of SEQ ID NO:207 in combination with an Fc region from a human IgG1 antibody. In such embodiments, the anti-TREM2 antibodies can comprise one or more of the mutations described above to lock the anti-TREM2 antibodies into a particular disulfide isoform. For instance, in one embodiment, the anti-TREM2 antibody comprises a CH1 region and hinge region from a human IgG2 antibody and an Fc region from a human IgG1 antibody and comprises a C131S mutation (according to the EU numbering scheme) in its heavy chain. In another embodiment, the anti-TREM2 antibody comprises a CH1 region and hinge region from a human IgG2 antibody and an Fc region from a human IgG1 antibody and comprises a C214S mutation (according to the EU numbering scheme) in its light chain and a C220S mutation (according to the EU numbering scheme) in its heavy chain. In yet another embodiment, the anti-TREM2 antibody comprises a CH1 region and hinge region from a human IgG2 antibody and an Fc region from a human IgG1 antibody and comprises a C214S mutation (according to the EU numbering scheme) in its light chain and a C219S mutation (according to the EU numbering scheme) in its heavy chain.

[0691] In embodiments in which the anti-TREM2 antibodies comprise a CH1 region and hinge region from a human IgG2 antibody and an Fc region from a human IgG1 antibody, the anti-TREM2 antibodies may comprise any of the mutations in the Fc region described above to modulate the glycosylation of the antibodies. For instance, the human IgG1 Fc region of such anti-TREM2 antibodies may comprise a mutation at amino acid position N297 (according to the EU numbering scheme) in its heavy chain. In one particular embodiment, the N297 mutation is a N297G mutation. In certain embodiments, the Fc region may further comprise R292C and V302C mutations (according to the EU numbering scheme) in its heavy chain.

[0692] In certain embodiments, the anti-TREM2 antibodies of the invention comprise a CH1 region and hinge region from a human IgG2 antibody and an Fc region from a human IgG1 antibody, wherein the Fc region comprises the amino acid sequence of:

(SEQ ID NO: 281)
APELLGGPSVFLFPPKPKDTLMISRTPEVTCVVVDVSHEDPEVKFNWYVD
GVEVHNAKTKPREEQYGSTYRVVSVLTVLHQDWLNGKEYKCKVSNKALPA
PIEKTISKAKGQPREPQVYTLPPSREEMTKNQVSLTCLVKGFYPSDIAVE
WESNGQPENNYKTTPPVLDSDGSFFLYSKLTVDKSRWQQGNVFSCSVMHE
ALHNHYTQKSLSLSPGK.

[0693] In other embodiments, the anti-TREM2 antibodies of the invention comprise a CH1 region and hinge region from a human IgG2 antibody and an Fc region from a human IgG1 antibody, wherein the Fc region comprises the amino acid sequence of:

(SEQ ID NO: 282)
APELLGGPSVFLFPPKPKDTLMISRTPEVTCVVVDVSHEDPEVKFNWYVD
GVEVHNAKTKPCEEQYGSTYRCVSVLTVLHQDWLNGKEYKCKVSNKALPA
PIEKTISKAKGQPREPQVYTLPPSREEMTKNQVSLTCLVKGFYPSDIAVE
WESNGQPENNYKTTPPVLDSDGSFFLYSKLTVDKSRWQQGNVFSCSVMHE
ALHNHYTQKSLSLSPGK.

[0694] Modifications of the TREM2 agonist antigen binding proteins of the invention to increase serum half-life also may desirable, for example, by incorporation of or addition of a salvage receptor binding epitope (e.g., by mutation of the appropriate region or by incorporating the epitope into a peptide tag that is then fused to the antigen binding protein at either end or in the middle, e.g., by DNA or peptide synthesis; see, e.g., WO96/32478) or adding molecules such as PEG or other water soluble polymers, including polysaccharide polymers. The salvage receptor binding epitope preferably constitutes a region wherein any one or more amino acid residues from one or two loops of an Fc region are transferred to an analogous position in the antigen binding protein. Even more preferably, three or more residues from one or two loops of the Fc region are transferred. Still more preferred, the epitope is taken from the CH2 domain of the Fc region (e.g., an IgG Fc region) and transferred to the CH1, CH3, or VH region, or more than one such region, of the antigen binding protein. Alternatively, the epitope is taken from the CH2 domain of the Fc region and transferred to the CL region or VL region, or both, of the antigen binding protein. See International applications WO 97/34631 and WO 96/32478 for a description of Fc variants and their interaction with the salvage receptor.

### Antibody Fragments

[0695] In some embodiments, the antigen binding agent can be a fragment of the antibody of the present disclosure, including portions of a full length antibody, and includes the antigen binding or variable region. Exemplary antibody fragments include Fab, Fab′, F(ab′)₂ and Fv fragments. In some embodiments, proteolytic digestion with papain produces two identical antigen binding fragments, the Fab′ fragment, each with a single antigen binding site. In some embodiments, proteolytic digestion with pepsin yields an F(ab′)₂ fragment that has two antigen binding fragments which are capable of cross-linking antigen, and a residual pFc′ fragment. In some embodiments, antibody fragments are produced directly in recombinant host-cells, for example host cells that that have a polynucleotide encoding an antigen binding agent described herein. For example, Fab, Fv and scFv antibody fragments can all be expressed in and secreted from E. coli, thus allowing the straightforward production of large amounts of these fragments. Anti-TREM2 antibody fragments can also be isolated from the antibody phage libraries as discussed above. Alternatively, Fab′-SH fragments can be directly recovered from E. coli and chemically coupled to form F(ab′)₂ fragments (Carter et al., Bio/Technology 10:163-167 (1992)). According to another approach, F(ab′)₂ fragments can be isolated directly from recombinant host-cell culture. Production of Fab and F(ab′)₂ antibody fragments with increased in vivo half-lives are described in U.S. Pat. No. 5,869,046. In other embodiments, the antibody of choice is a single chain Fv fragment (scFv). See WO 93/16185; U.S. Pat. Nos. 5,571,894, 5,587,458. Accordingly, other types of fragments can include diabodies, linear antibodies, single-chain antibodies, and multispecific antibodies formed from antibody fragments. In some embodiments, the antibody fragments are functional in that they retain the desired antigen binding properties, e.g., specific binding to TREM2, activation of TREM2 activities, and the like as described herein.

### Bispecific Antibodies

[0696] In some embodiments, the TREM2 binding protein is a bispecific antibody that binds to a TREM2 protein of the present disclosure and a second antigen. In some embodiments, bispecific antibodies of the present disclosure bind to one or more amino acid residues of human TREM2 (SEQ ID NO: 1), or amino acid residues on a TREM2 protein corresponding to amino acid residues of SEQ ID NO: 1. In some embodiments, any of the TREM2 binding proteins described herein can be used to prepare the bispecific antibody.

[0697] In some embodiments, bispecific antibodies of the present disclosure recognize a first antigen and a second antigen. In some embodiments, the first antigen is human TREM2 or a naturally occurring variant thereof. In some embodiments, the second antigen is DAP12, or other proteins or ligand that interact with TREM2. In some embodiments, the second antigen is (a) an antigen facilitating transport across the blood-brain-barrier; (b) an antigen facilitating transport across the blood-brain-barrier, for example transferrin receptor (TR), insulin receptor (HIR), insulin-like growth factor receptor (IGFR), low-density lipoprotein receptor related proteins 1 and 2 (LPR-1 and 2), diphtheria toxin receptor, CRM 197, a llama single domain antibody, TMEM 30(A), a protein transduction domain, TAT, Syn-B, penetratin, a poly-arginine peptide, an angiopep peptide, and ANG1005; (c) a disease-causing protein selected from amyloid beta, oligomeric amyloid beta, amyloid beta plaques, amyloid precursor protein or fragments thereof, Tau, IAPP, alpha-synuclein, TDP-43, FUS protein, C9orf72 (chromosome 9 open reading frame 72), c9RAN protein, prion protein, PrPSc, huntingtin, calcitonin, superoxide dismutase, ataxin, ataxin 1, ataxin 2, ataxin 3, ataxin 7, ataxin 8, ataxin 10, Lewy body, atrial natriuretic factor, islet amyloid polypeptide, insulin, apolipoprotein A1, serum amyloid A, medin, prolactin, transthyretin, lysozyme, beta 2 microglobulin, gelsolin, keratoepithelin, cystatin, immunoglobulin light chain AL, S-IBM protein, Repeat-associated non-ATG (RAN) translation products, DiPeptide repeat (DPR) peptides, glycine-alanine (GA) repeat peptides, glycine-proline (GP) repeat peptides, glycine-arginine (GR) repeat peptides, proline-alanine (PA) repeat peptides, ubiquitin, and proline-arginine (PR) repeat peptides; and (d) ligands and/or proteins expressed on immune cells, wherein the ligands and/or proteins selected from CD40, OX40, ICOS, CD28, CD137/4-1BB, CD27, GITR, PD-L1, CTLA-4, PD-L2, PD-1, B7-H3, B7-H4, HVEM, BTLA, KIR, GAL9, TIM3, A2AR, LAG-3, and phosphatidylserine; and (e) a protein, lipid, polysaccharide, or glycolipid expressed on one or more tumor cells and any combination thereof.

[0698] Methods for making bispecific antibodies are known in the art. Traditional production of full-length bispecific antibodies is based on the coexpression of two immunoglobulin heavy-chain/light chain pairs, where the two chains have different specificities. Millstein et al., Nature, 305:537-539 (1983). Because of the random assortment of immunoglobulin heavy and light chains, these hybridomas (quadromas) produce a potential mixture of 10 different antibody molecules, of which only one has the correct bispecific structure. Purification of the correct molecule, which is usually done by affinity chromatography steps, is rather cumbersome, and the product yields are low. Similar procedures are disclosed in WO 93/08829 and in Traunecker et al., EMBO J., 10:3655-3659 (1991).

[0699] In some embodiments, antibody variable domains with the desired binding specificities (antibody-antigen combining sites) are fused to immunoglobulin constant domain sequences. The fusion preferably is with an immunoglobulin heavy chain constant domain, comprising at least part of the hinge, CH2, and CH3 regions. It is preferred to have the first heavy-chain constant region (CH1) containing the site necessary for light chain binding, present in at least one of the fusions. DNAs encoding the immunoglobulin heavy chain fusions and, if desired, the immunoglobulin light chain, are inserted into separate expression vectors, and are co-transfected into a suitable host organism. This provides for great flexibility in adjusting the mutual proportions of the three polypeptide fragments in embodiments when unequal ratios of the three polypeptide chains used in the construction provide the optimum yields. It is, however, possible to insert the coding sequences for two or all three polypeptide chains in one expression vector when the expression of at least two polypeptide chains in equal ratios results in high yields or when the ratios are of no particular significance.

[0700] In some embodiments, the bispecific antibodies are composed of a hybrid immunoglobulin heavy chain with a first binding specificity in one arm, and a hybrid immunoglobulin heavy chain-light chain pair (providing a second binding specificity) in the other arm. It was found that this asymmetric structure facilitates the separation of the desired bispecific compound from unwanted immunoglobulin chain combinations, as the presence of an immunoglobulin light chain in only half of the bispecific molecules provides for an easy way of separation. This approach is disclosed in WO 94/04690. For further details of generating bispecific antibodies, see, for example, Suresh et al., Methods in Enzymology 121: 210 (1986); and Garber, Nature Reviews Drug Discovery 13, 799-801 (2014).

[0701] In some embodiments, the bispecific antibody can be prepared as described in WO 96/27011 or U.S. Pat. No. 5,731,168. In these embodiments, the interface between a pair of antibody molecules can be engineered to maximize the percentage of heterodimers which are recovered from recombinant-cell culture. The preferred interface comprises at least a part of the CH3 region of an antibody constant domain. In this method, one or more small amino acid side chains from the interface of the first antibody molecule are replaced with larger side chains (e.g., tyrosine or tryptophan). Compensatory “cavities” of identical or similar size to the large side chains(s) are created on the interface of the second antibody molecule by replacing large amino acid side chains with smaller ones (e.g., alanine or threonine). This provides a mechanism for increasing the yield of the heterodimer over other unwanted end-products such as homodimers.

[0702] In some embodiments, bispecific antibody can be prepared Techniques for generating bispecific antibodies from antibody fragments have been described in for example, Brennan et al., Science, 1985, 229:81, which describe proteolytic cleavage of intact antibodies to generate F(ab′)2 fragments, which are then reduced in the presence of the dithiol complexing agent sodium arsenite to stabilize vicinal dithiols and prevent intermolecular disulfide formation. The Fab′ fragments generated are then converted to thionitrobenzoate (TNB) derivatives. One of the Fab′-TNB derivatives is then reconverted to the Fab′-TNB derivative to form the bispecific antibody. The bispecific antibodies produced can be used as agents for the selective immobilization of enzyme.

[0703] Various techniques for making and isolating bivalent antibody fragments directly from recombinant-cell culture have also been described. For example, bivalent heterodimers have been produced using leucine zippers. Kostelny et al., Immunol., 1992, 148(5):1547-1553. The “diabody” technology described by Hollinger et al., Proc. Nat'l Acad. Sci. USA, 1993, 90: 6444-6448, provides an alternative mechanism for making bispecific/bivalent antibody fragments. The fragments comprise a heavy-chain variable domain (VH) connected to a light-chain variable domain (VL) by a linker which is too short to allow pairing between the two domains on the same chain. Accordingly, the VH and VL domains of one fragment are forced to pair with the complementary VL and VH domains of another fragment, thereby forming two antigen-binding sites. Another strategy for making bispecific/bivalent antibody fragments by the use of single-chain Fv (sFv) dimers (see, e.g., Gruber et al., Immunol, 152:5368 (1994).

### Single Chain Antibodies

[0704] In some embodiments, the TREM2 binding protein is a single chain antibody, e.g., single chain Fv (sFv or scFv) antibodies, in which a variable heavy and a variable light chain are joined together (directly or through a peptide linker) to form a continuous polypeptide. A single-chain Fv” or “sFv” antibody fragments comprise the VH and VL domains of an antibody, where these domains are present in a single polypeptide chain. Generally, the Fv polypeptide further comprises a polypeptide linker between the VH and VL domains which enables the sFv to form the desired structure for antigen binding. For a review of sFv, see Pluckthun in The Pharmacology of Monoclonal Antibodies, Vol. 113, pp. 269-315, Rosenburg and Moore, eds., Springer-Verlag, New York (1994). Any of the TREM2 binding agents described herein can be used to prepare a single chain antibody.

[0705] In some embodiments, single chain antibody can be prepared by phage display methods, where the antigen binding domain is expressed as a single polypeptide and screened for specific binding activity. Alternatively, the single chain antibody can be prepared by cloning the heavy and light chains from a cell, typically a hybridoma cell line expressing a desired antibody. Generally, a linker peptide, typically from 10 to 25 amino acids in length is used to link the heavy and light chains. The linker can be glycine, serine, and/or threonine rich to impart flexibility and solubility to the single chain antibody. Specific methods for generating single chain antibodies are described in, for example, Loffler et al., 2000, Blood 95(6):2098-103; Worn and Pluckthun, 2001, J Mol Biol. 305, 989-1010; Pluckthun, In The Pharmacology of Monoclonal Antibodies, Vol. 113, pp. 269-315, Rosenburg and Moore, eds., Springer-Verlag, New York (1994); U.S. Pat. Nos. 5,840,301; 5,844,093; and 5,892,020; all of which are incorporated herein by reference.

### Multivalent Antibodies

[0706] In some embodiments, the anti-TREM2 antibody is a multivalent antibody, which may be internalized (and/or catabolized) faster than a bivalent antibody by a cell expressing an antigen to which the antibodies bind. In some embodiments, the anti-TREM2 antibodies of the present disclosure or antibody fragments thereof can be multivalent antibodies (which are other than of the IgM class) with three or more antigen binding sites (e.g., tetravalent antibodies), which can be readily produced by recombinant expression of nucleic acid encoding the polypeptide chains of the antibody. The multivalent antibody can comprise a dimerization domain and three or more antigen binding sites. A preferred dimerization domain comprises an Fc region or a hinge region. In this scenario, the antibody will comprise an Fc region and three or more antigen binding sites amino-terminal to the Fc region. The preferred multivalent antibody herein contains three to about eight, but preferably four, antigen binding sites. The multivalent antibody contains at least one polypeptide chain (and preferably two polypeptide chains), wherein the polypeptide chain or chains comprise two or more variable domains. For instance, the polypeptide chain or chains may comprise VD1-(X1)n-VD2-(X2)n-Fc, wherein VD1 is a first variable domain, VD2 is a second variable domain, Fc is one polypeptide chain of an Fc region, X1 and X2 represent an amino acid or polypeptide, and n is 0 or 1. Similarly, the polypeptide chain or chains may comprise VH-CH1-flexible linker- VH-CH1-Fc region chain; or VH-CH1-VH-CH1-FC region chain. The multivalent antibody herein preferably further comprises at least two (and preferably four) light chain variable domain polypeptides. The multivalent antibody herein may, for instance, comprise from about two to about eight light chain variable domain polypeptides. The light chain variable domain polypeptides contemplated here comprise a light chain variable domain and, optionally, further comprise a CL domain.

[0707] Multivalent antibodies may recognize the TREM2 antigen as well as without limitation additional antigens A beta peptide, antigen or an alpha synuclein protein antigen or, Tau protein antigen or, TDP-43 protein antigen or, prion protein antigen or, huntingtin protein antigen, or RAN, translation Products antigen, including the DiPeptide Repeats, (DPRs peptides) composed of glycine-alanine (GA), glycine-proline (GP), glycine-arginine (GR), proline-alanine (PA), or proline-arginine (PR), Insulin receptor, insulin like growth factor receptor. Transferrin receptor or any other antigen that facilitate antibody transfer across the blood brain barrier.

### Polynucleotides Encoding TREM12 Antibodies

[0708] In another aspect, the present disclosure provides polynucleotides encoding the antibodies or antigen binding regions of the described herein. In particular, the polynucleotides are isolated polynucleotides. The polynucleotides may be operatively linked to one or more heterologous control sequences that control gene expression to create a recombinant polynucleotide capable of expressing the polypeptide of interest. Expression constructs containing a heterologous polynucleotide encoding the relevant polypeptide or protein can be introduced into appropriate host cells to express the corresponding polypeptide.

[0709] As will be appreciated by those in the art, due to the degeneracy of the genetic code, where the same amino acids are encoded by alternative or synonymous codons, an extremely large number of nucleic acids can be made, all of which encode the CDRs, variable regions, and heavy and light chains or other components of the antigen binding proteins described herein. Thus, having identified a particular amino acid sequence, those skilled in the art could make any number of different nucleic acids, by simply modifying the sequence of one or more codons in a way which does not change the amino acid sequence of the encoded protein. In this regard, the present disclosure includes each and every possible variation of polynucleotides that encode the polypeptides disclosed herein.

[0710] An “isolated nucleic acid,” which is used interchangeably herein with “isolated polynucleotide,” is a nucleic acid that has been separated from adjacent genetic sequences present in the genome of the organism from which the nucleic acid was isolated, in the case of nucleic acids isolated from naturally-occurring sources. In the case of nucleic acids synthesized enzymatically from a template or chemically, such as PCR products, cDNA molecules, or oligonucleotides for example, it is understood that the nucleic acids resulting from such processes are isolated nucleic acids. An isolated nucleic acid molecule refers to a nucleic acid molecule in the form of a separate fragment or as a component of a larger nucleic acid construct. In one preferred embodiment, the nucleic acids are substantially free from contaminating endogenous material.

[0711] In some embodiments, the polynucleotide encodes a CDR L1, CDR L2 and CDR L3 of a light chain variable region described herein. In some embodiments, the polynucleotide encodes a CDR H1, CDR H2 and CDR H3 of a heavy chain variable region described herein.

[0712] In some embodiments, the polynucleotide encodes a CDR L1, CDR L2 and CDR L3 of a light chain variable region and a CDR H1, CDR H2 and CDR H3 of a heavy chain variable region described herein.

[0713] In some embodiments, the polynucleotide encodes a light chain variable region VL having at least 80%, 85%, 90%, 91%, 92%, 93%, 94%, 95%, 96%, 97%, 98%, 99% or greater sequence identity to the amino acid sequence of a variable light chain disclosed herein.

[0714] In some embodiments, the polynucleotide encodes a heavy chain variable region VH having at least 80%, 85%, 90%, 91%, 92%, 93%, 94%, 95%, 96%, 97%, 98%, 99% or greater sequence identity to the amino acid sequence of a variable heavy chain disclosed herein.

[0715] In some embodiments, the polynucleotides herein may be manipulated in a variety of ways to provide for expression of the encoded polypeptide. In some embodiments, the polynucleotide is operably linked to control sequences, including among others, transcription promoters, leader sequences, transcription enhancers, ribosome binding or entry sites, termination sequences, and polyadenylation sequences for expression of the polynucleotide and/or corresponding polypeptide. Manipulation of the isolated polynucleotide prior to its insertion into a vector may be desirable or necessary depending on the expression vector. The techniques for modifying polynucleotides and nucleic acid sequences utilizing recombinant DNA methods are well known in the art. Guidance is provided in Sambrook et al., Molecular Cloning: A Laboratory Manual, 3rd Ed., Cold Spring Harbor Laboratory Press (2001); and Current Protocols in Molecular Biology, Ausubel. F. ed., Greene Pub. Associates (1998), updates to 2013.

[0716] In some embodiments, variants of the antigen binding proteins, including the variants described herein, can be prepared by site-specific mutagenesis of nucleotides in the DNA encoding the polypeptide, using cassette or PCR mutagenesis or other techniques well known in the art, to produce DNA encoding the variant, and thereafter expressing the recombinant DNA in cell culture as outlined herein. However, antigen binding proteins comprising variant CDRs having up to about 100-150 residues may be prepared by in vitro synthesis using established techniques. The variants typically exhibit the same qualitative biological activity as the naturally occurring analogue, e.g., binding to antigen. Such variants include, for example, deletions and/or insertions and/or substitutions of residues within the amino acid sequences of the antigen binding proteins. Any combination of deletion, insertion, and substitution is made to arrive at the final construct, provided that the final construct possesses the desired characteristics. The amino acid changes also may alter post-translational processes of the antigen binding protein, such as changing the number or position of glycosylation sites. In some embodiments, antigen binding protein variants are prepared with the intent to modify those amino acid residues which are directly involved in epitope binding. In other embodiments, modification of residues which are not directly involved in epitope binding or residues not involved in epitope binding in any way, is desirable, for purposes discussed herein. Mutagenesis within any of the CDR regions, framework regions, and/or constant regions is contemplated. Covariance analysis techniques can be employed by the skilled artisan to design useful modifications in the amino acid sequence of the antigen binding protein. See, e.g., Choulier, et al., Proteins 41:475-484, 2000; Demarest et al., J. Mol. Biol., 2004, 335:41-48; Hugo et al., Protein Engineering, 2003, 16(5):381-86; Aurora et al., US Patent Publication No. 2008/0318207 A1; Glaser et al., US Patent Publication No. 2009/0048122 A1; Urech et al., WO 2008/110348 A1; Borras et al., WO 2009/000099 A2. Such modifications determined by covariance analysis can improve potency, pharmacokinetic, pharmacodynamic, and/or manufacturability characteristics of an antigen binding protein.

[0717] In another aspect, the present invention also provides vectors comprising one or more nucleic acids or polynucleotides encoding one or more components of the antigen binding proteins describe herein (e.g. variable regions, light chains, and heavy chains). As used herein, the term “vector” refers to any molecule or entity (e.g., nucleic acid, plasmid, bacteriophage or virus) used to transfer protein coding information into a host cell. Examples of vectors include, but are not limited to, plasmids, viral vectors, non-episomal mammalian vectors and expression vectors, for example, recombinant expression vectors. The term “expression vector” or “expression construct” as used herein refers to a recombinant DNA molecule containing a desired coding sequence and appropriate nucleic acid control sequences necessary for the expression of the operably linked coding sequence in a particular host cell. An expression vector can include, but is not limited to, sequences that affect or control transcription, translation, and, if introns are present, affect RNA splicing of a coding region operably linked thereto. Nucleic acid sequences necessary for expression in prokaryotes include a promoter, optionally an operator sequence, a ribosome binding site and possibly other sequences. Eukaryotic cells are known to utilize promoters, enhancers, and termination and polyadenylation signals. A secretory signal peptide sequence can also, optionally, be encoded by the expression vector, operably linked to the coding sequence of interest, so that the expressed polypeptide can be secreted by the recombinant host cell, for more facile isolation of the polypeptide of interest from the cell, if desired.

[0718] The recombinant expression vector may be any vector (e.g., a plasmid or virus), which can be conveniently subjected to recombinant DNA procedures and can bring about the expression of the polynucleotide sequence. The choice of the vector will typically depend on the compatibility of the vector with the host cell into which the vector is to be introduced. The vectors may be linear or closed circular plasmids. Exemplary expression vectors include, among others, vectors based on T7 or T71ac promoters (pACY: Novagen; pET); vectors based on Baculovirus promoters (e.g., pBAC); vectors based on Ef1-α and HTLV promoters (e.g., pFUSE2; Invitrogen, CA, USA); vectors based on CMV enhancer and human ferritin light chain gene promoters (e.g., pFUSE: Invitrogen, CA, USA); vectors based on CMV promoters (e.g, pFLAG: Sigma, USA); and vectors based on dihydrofolate reductase promoters (e.g., pEASE: Amgen, USA). Various vectors can be used for transient or stable expression of the polypeptides of interest.

### Host Cells

[0719] In another aspect, the polynucleotide encoding the antigen binding proteins described herein (e.g. variable regions, light chains, and heavy chains) is operatively linked to one or more control sequences for expression of the polypeptide in the host cell. Accordingly, in a further aspect, the present disclosure provides a host cell comprising one or more expression vectors encoding the components of the TREM2 agonist antigen binding proteins described herein.

[0720] Exemplary host cells include prokaryote, yeast, or higher eukaryote cells. Prokaryotic host cells include eubacteria, such as Gram-negative or Gram-positive organisms, for example, Enterobacteriaceae such as Escherichia, e.g., E. coli, Enterobacter, Erwinia, Klebsiella, Proteus, Salmonella, e.g., Salmonella typhimurium, Serratia, e.g., Serratia marcescans, and Shigella, as well as Bacillus, such as B. subtilis and B. licheniformis, Pseudomonas, and Streptomyces. Eukaryotic microbes such as filamentous fungi or yeast are suitable cloning or expression hosts for recombinant polypeptides. Saccharomyces cerevisiae, or common baker's yeast, is the most commonly used among lower eukaryotic host microorganisms. However, a number of other genera, species, and strains are commonly available and useful herein, such as Pichia, e.g. P. pastoris, Schizosaccharomyces pombe; Kluyveromyces, Yarrowia; Cantida; Trichoderma reesia; Neurospora crassa; Schwanniomyces, such as Schwanniomyces occidentalis; and filamentous fungi, such as, e.g., Neurospora, Penicillium, Tolypocladium, and Aspergillus hosts such as A. nidulans and A. niger.

[0721] Host cells for the expression of glycosylated antigen binding proteins can be derived from multicellular organisms. Examples of invertebrate cells include plant and insect cells. Numerous baculoviral strains and variants and corresponding permissive insect host cells from hosts such as Spodoptera frugiperda (caterpillar), Aedes aegypti (mosquito), Aedes albopictus (mosquito), Drosophila melanogaster (fruitfly), and Bombyx mori have been identified. A variety of viral strains for transfection of such cells are publicly available, e.g., the L-1 variant of Autographa californica NPV and the Bm-5 strain of Bombyx mori NPV.

[0722] Vertebrate host cells are also suitable hosts, and recombinant production of antigen binding proteins from such cells has become routine procedure. Mammalian cell lines available as hosts for expression are well known in the art and include, but are not limited to, immortalized cell lines available from the American Type Culture Collection (ATCC), including but not limited to Chinese hamster ovary (CHO) cells, including CHOK1 cells (ATCC CCL61), DXB-11, DG-44, and Chinese hamster ovary cells/-DHFR (CHO, Urlaub et al., Proc. Natl. Acad. Sci. USA, 1980, 77: 4216); monkey kidney CV1 line transformed by SV40 (COS-7, ATCC CRL 1651); human embryonic kidney line (293 or 293 cells subcloned for growth in suspension culture, (Graham et al., J. Gen Virol. 36: 59, 1977); baby hamster kidney cells (BHK, ATCC CCL 10); mouse sertoli cells (TM4, Mather, Biol. Reprod., 1980, 23:243-251); monkey kidney cells (CV1 ATCC CCL 70); African green monkey kidney cells (VERO-76, ATCC CRL-1587); human cervical carcinoma cells (HELA, ATCC CCL 2); canine kidney cells (MDCK, ATCC CCL 34); buffalo rat liver cells (BRL 3A, ATCC CRL 1442); human lung cells (W138, ATCC CCL 75); human hepatoma cells (Hep G2, HB8065); mouse mammary tumor (MMT 060562, ATCC CCL51); TRI cells (Mather et al., Annals N.Y Acad. Sci., 1982, 383:44-68); MRC 5 cells or FS4 cells; mammalian myeloma cells, and a number of other cell lines. In certain embodiments, cell lines may be selected through determining which cell lines have high expression levels and constitutively produce antigen binding proteins with human TREM2 binding properties. In another embodiment, a cell line from the B cell lineage that does not make its own antibody but has a capacity to make and secrete a heterologous antibody can be selected. CHO cells are preferred host cells in some embodiments for expressing the TREM2 agonist antigen binding proteins of the invention.

[0723] In various embodiments, introduction and transformation of a host cell with a polynucleotide of the present disclosure, such as an expression vector for expressing an antigen binding protein, is accomplished by methods that including transfection, infection, calcium phosphate co-precipitation, electroporation, microinjection, lipofection, DEAE-dextran mediated transfection, or other known techniques. In some embodiments, the method selected can be guided by the type of host cell used. Suitable methods are described in, for example, Sambrook et al., 2001.

### Expression and Isolation

[0724] In some embodiments, the host cell comprising a polynucleotide encoding one or more components of the antigen binding proteins described herein (e.g. variable regions, light chains, and heavy chains) is used to express the antigen binding protein of interest. In some embodiments, a method for expressing the antigen binding protein comprises culturing the host cell in suitable media and conditions appropriate for expression of the protein of interest.

[0725] The type of media and culture conditions selected is based on the type of host cell. In some embodiments, exemplary media for mammalian host cells include, by way of example and not limitation, Ham's F10 (Sigma), Minimal Essential Medium (MEM, Sigma), RPMI-1640 (Sigma), and Dulbecco's Modified Eagle's Medium (DMEM, Sigma. In some embodiments, the media can be supplemented as necessary with hormones and/or other growth factors (such as insulin, transferrin, or epidermal growth factor), salts (such as sodium chloride, calcium, magnesium, and phosphate), buffers (such as HEPES), nucleotides (such as adenosine and thymidine), antibiotics (such as Gentamycin™ drug), trace elements (defined as inorganic compounds usually present at final concentrations in the micromolar range), and glucose or an equivalent energy source. In some embodiments, culture conditions, such as temperature, pH, % CO₂, and the like, can use conditions available and known to the skilled artisan.

[0726] In some embodiments, the expressed antigen binding protein is isolate and/or purified from the host cell. In some embodiments in which the expressed protein in present in the media, the media containing the expressed protein is subject to isolation procedures. In some embodiments in which the antigen binding protein is produced intracellularly, the cells are subject to disruption, and as a first step, the particulate debris, either host cells or lysed fragments, is removed, for example, by centrifugation or ultrafiltration. Subsequently, the antigen binding protein can be isolated and further purified by various known techniques. Such isolation techniques include affinity chromatography with Protein-A Sepharose, size-exclusion chromatography, ion-exchange chromatography, high performance liquid chromatography, differential solubility, and the like (see, e.g., Fisher, Laboratory Techniques, In Biochemistry And Molecular Biology, Work and Burdon, eds., Elsevier (1980); Antibodies: A Laboratory Manual, Greenfield, E.A., ed., Cold Spring Harbor Laboratory Press, New York (2012); Coligan, et al., supra, sections 2.7.1-2.7.12 and sections 2.9.1-2.9.3; Barnes, et al., Purification of Immunoglobulin G (IgG), in Methods Mol. Biol., Vol. 10, pages 79-104, Humana Press (1992)).

[0727] In some embodiments, the isolated antibody can be further purified as measurable by: (1) weight of protein as determined using the Lowry method; (2) to a degree sufficient to obtain at least 15 residues of N-terminal or internal amino acid sequence by use of a spinning-cup sequencer; or (3) to homogeneity by SDS-PAGE under reducing or non-reducing conditions using Coomassie blue or, preferably, silver stain. The purified antibody can be 85% or greater, 90% or greater, 95% or greater, or at least 99% by weight as determined by the foregoing methods.

### Antibody Formulations

[0728] In certain embodiments, the invention provides a composition (e.g. a pharmaceutical composition) comprising one or a plurality of the TREM2 activating antibodies and TREM2 agonist antibodies and antigen binding proteins disclosed herein together with pharmaceutically acceptable diluents, carriers, excipients, solubilizers, emulsifiers, preservatives, and/or adjuvants. Pharmaceutical compositions of the invention include, but are not limited to, liquid, frozen, and lyophilized compositions. “Pharmaceutically-acceptable” refers to molecules, compounds, and compositions that are non-toxic to human recipients at the dosages and concentrations employed and/or do not produce allergic or adverse reactions when administered to humans. In some embodiments, the pharmaceutical composition may contain formulation materials for modifying, maintaining or preserving, for example, the pH, osmolarity, viscosity, clarity, color, isotonicity, odor, sterility, stability, rate of dissolution or release, adsorption or penetration of the composition. In such embodiments, suitable formulation materials include, but are not limited to, amino acids (such as glycine, glutamine, asparagine, arginine or lysine); antimicrobials; antioxidants (such as ascorbic acid, sodium sulfite or sodium hydrogen-sulfite); buffers (such as borate, bicarbonate, Tris-HCl, citrates, phosphates or other organic acids); bulking agents (such as mannitol or glycine); chelating agents (such as ethylenediamine tetraacetic acid (EDTA)); complexing agents (such as caffeine, polyvinylpyrrolidone, beta-cyclodextrin or hydroxypropyl-beta-cyclodextrin); fillers; monosaccharides; disaccharides; and other carbohydrates (such as glucose, mannose or dextrins); proteins (such as serum albumin, gelatin or immunoglobulins); coloring, flavoring and diluting agents; emulsifying agents; hydrophilic polymers (such as polyvinylpyrrolidone); low molecular weight polypeptides; salt-forming counterions (such as sodium); preservatives (such as benzalkonium chloride, benzoic acid, salicylic acid, thimerosal, phenethyl alcohol, methylparaben, propylparaben, chlorhexidine, sorbic acid or hydrogen peroxide); solvents (such as glycerin, propylene glycol or polyethylene glycol); sugar alcohols (such as mannitol or sorbitol); suspending agents; surfactants or wetting agents (such as pluronics, PEG, sorbitan esters, polysorbates such as polysorbate 20, polysorbate 80, triton, tromethamine, lecithin, cholesterol, tyloxapal); stability enhancing agents (such as sucrose or sorbitol); tonicity enhancing agents (such as alkali metal halides, preferably sodium or potassium chloride, mannitol sorbitol); delivery vehicles; diluents; excipients and/or pharmaceutical adjuvants. Methods and suitable materials for formulating molecules for therapeutic use are known in the pharmaceutical arts, and are described, for example, in Remington's Pharmaceutical Sciences, 18th Ed., (A.R. Genrmo, ed.), 1990, Mack Publishing Company.

[0729] In some embodiments, the pharmaceutical composition of the invention comprises a standard pharmaceutical carrier, such as a sterile phosphate buffered saline solution, bacteriostatic water, and the like. A variety of aqueous carriers may be used, e.g., water, buffered water, 0.4% saline, 0.3% glycine and the like, and may include other proteins for enhanced stability, such as albumin, lipoprotein, globulin, etc., subjected to mild chemical modifications or the like.

[0730] Exemplary concentrations of the antigen binding proteins in the formulation may range from about 0.1 mg/ml to about 200 mg/ml or from about 0.1 mg/mL to about 50 mg/mL, or from about 0.5 mg/mL to about 25 mg/mL, or alternatively from about 2 mg/mL to about 10 mg/mL. An aqueous formulation of the antigen binding protein may be prepared in a pH-buffered solution, for example, at pH ranging from about 4.5 to about 6.5, or from about 4.8 to about 5.5, or alternatively about 5.0. Examples of buffers that are suitable for a pH within this range include acetate (e.g. sodium acetate), succinate (such as sodium succinate), gluconate, histidine, citrate and other organic acid buffers. The buffer concentration can be from about 1 mM to about 200 mM, or from about 10 mM to about 60 mM, depending, for example, on the buffer and the desired isotonicity of the formulation.

[0731] A tonicity agent, which may also stabilize the antigen binding protein, may be included in the formulation. Exemplary tonicity agents include polyols, such as mannitol, sucrose or trehalose. Preferably the aqueous formulation is isotonic, although hypertonic or hypotonic solutions may be suitable. Exemplary concentrations of the polyol in the formulation may range from about 1% to about 150% w/v.

[0732] A surfactant may also be added to the antigen binding protein formulation to reduce aggregation of the formulated antigen binding protein and/or minimize the formation of particulates in the formulation and/or reduce adsorption. Exemplary surfactants include nonionic surfactants such as polysorbates (e.g., polysorbate 20 or polysorbate 80) or poloxamers (e.g., poloxamer 188). Exemplary concentrations of surfactant may range from about 0.001% to about 0.5%, or from about 0.005% to about 0.2%, or alternatively from about 0.004% to about 0.01% w/v.

[0733] In one embodiment, the formulation contains the above-identified agents (i.e. antigen binding protein, buffer, polyol and surfactant) and is essentially free of one or more preservatives, such as benzyl alcohol, phenol, m-cresol, chlorobutanol and benzethonium chloride. In another embodiment, a preservative may be included in the formulation, e.g., at concentrations ranging from about 0.1% to about 2%, or alternatively from about 0.5% to about 1%. One or more other pharmaceutically acceptable carriers, excipients or stabilizers such as those described in REMINGTON'S PHARMACEUTICAL SCIENCES, 18th Edition, (A.R. Genrmo, ed.), 1990, Mack Publishing Company, may be included in the formulation provided that they do not adversely affect the desired characteristics of the formulation.

[0734] Therapeutic formulations of the antigen binding protein are prepared for storage by mixing the antigen binding protein having the desired degree of purity with optional physiologically acceptable carriers, excipients or stabilizers (Remington's Pharmaceutical Sciences, 18th Ed., (A.R. Genrmo, ed.), 1990, Mack Publishing Company), in the form of lyophilized formulations or aqueous solutions. Acceptable carriers, excipients, or stabilizers are nontoxic to recipients at the dosages and concentrations employed, and include buffers (e.g. phosphate, citrate, and other organic acids); antioxidants (e.g. ascorbic acid and methionine); preservatives (such as octadecyldimethylbenzyl ammonium chloride, hexamethonium chloride, benzalkonium chloride, benzethonium chloride, phenol, butyl or benzyl alcohol, alkyl parabens such as methyl or propyl paraben, catechol; resorcinol, cyclohexanol, 3-pentanol, and m-cresol); low molecular weight (e.g. less than about 10 residues) polypeptides; proteins (such as serum albumin, gelatin, or immunoglobulins); hydrophilic polymers (e.g. polyvinylpyrrolidone); amino acids (e.g. glycine, glutamine, asparagine, histidine, arginine, or lysine); monosaccharides, disaccharides, and other carbohydrates including glucose, mannose, maltose, or dextrins; chelating agents such as EDTA; sugars such as sucrose, mannitol, trehalose or sorbitol; salt-forming counter-ions such as sodium; metal complexes (e.g., Zn-protein complexes); and/or non-ionic surfactants, such as polysorbates (e.g. polysorbate 20 or polysorbate 80) or poloxamers (e.g. poloxamer 188); or polyethylene glycol (PEG).

[0735] In one embodiment, a suitable formulation of the claimed invention contains an isotonic buffer such as a phosphate, acetate, or TRIS buffer in combination with a tonicity agent, such as a polyol, sorbitol, sucrose or sodium chloride, which tonicifies and stabilizes. One example of such a tonicity agent is 5% sorbitol or sucrose. In addition, the formulation could optionally include a surfactant at 0.01% to 0.02% wt/vol, for example, to prevent aggregation or improve stability. The pH of the formulation may range from 4.5 to 6.5 or 4.5 to 5.5. Other exemplary descriptions of pharmaceutical formulations for antigen binding proteins may be found in US Patent Publication No. 2003/0113316 and U.S. Pat. No. 6,171,586, each of which is hereby incorporated by reference in its entirety.

[0736] Suspensions and crystal forms of antigen binding proteins are also contemplated. Methods to make suspensions and crystal forms are known to one of skill in the art.

[0737] The formulations to be used for in vivo administration must be sterile. The compositions of the invention may be sterilized by conventional, well-known sterilization techniques. For example, sterilization is readily accomplished by filtration through sterile filtration membranes. The resulting solutions may be packaged for use or filtered under aseptic conditions and lyophilized, the lyophilized preparation being combined with a sterile solution prior to administration.

[0738] The process of freeze-drying is often employed to stabilize polypeptides for long-term storage, particularly when the polypeptide is relatively unstable in liquid compositions. A lyophilization cycle is usually composed of three steps: freezing, primary drying, and secondary drying (see Williams and Polli, Journal of Parenteral Science and Technology, 1984, 38(2):48-59). In the freezing step, the solution is cooled until it is adequately frozen. Bulk water in the solution forms ice at this stage. The ice sublimes in the primary drying stage, which is conducted by reducing chamber pressure below the vapor pressure of the ice, using a vacuum. Finally, sorbed or bound water is removed at the secondary drying stage under reduced chamber pressure and an elevated shelf temperature. The process produces a material known as a lyophilized cake. Thereafter the cake can be reconstituted prior to use.

[0739] The standard reconstitution practice for lyophilized material is to add back a volume of pure water (typically equivalent to the volume removed during lyophilization), although dilute solutions of antibacterial agents are sometimes used in the production of pharmaceuticals for parenteral administration (see Chen, Drug Development and Industrial Pharmacy, Volume 18: 1311-1354, 1992).

[0740] Excipients have been noted in some cases to act as stabilizers for freeze-dried products (see Carpenter et al., Volume 74: 225-239, 1991). For example, known excipients include polyols (including mannitol, sorbitol and glycerol); sugars (including glucose and sucrose); and amino acids (including alanine, glycine and glutamic acid).

[0741] In addition, polyols and sugars are also often used to protect polypeptides from freezing and drying-induced damage and to enhance the stability during storage in the dried state. In general, sugars, in particular disaccharides, are effective in both the freeze-drying process and during storage. Other classes of molecules, including mono- and di-saccharides and polymers such as PVP, have also been reported as stabilizers of lyophilized products.

[0742] For injection, the pharmaceutical formulation and/or medicament may be a powder suitable for reconstitution with an appropriate solution as described above. Examples of these include, but are not limited to, freeze dried, rotary dried or spray dried powders, amorphous powders, granules, precipitates, or particulates. For injection, the formulations may optionally contain stabilizers, pH modifiers, surfactants, bioavailability modifiers and combinations of these.

[0743] Sustained-release preparations may be prepared. Suitable examples of sustained-release preparations include semipermeable matrices of solid hydrophobic polymers containing the antigen binding protein, which matrices are in the form of shaped articles, e.g., films, or microcapsule. Examples of sustained-release matrices include polyesters, hydrogels (for example, poly(2-hydroxyethyl-methacrylate), or poly(vinylalcohol)), polylactides (U.S. Pat. No. 3,773,919), copolymers of L-glutamic acid and y ethyl-L-glutamate, non-degradable ethylene-vinyl acetate, degradable lactic acid-glycolic acid copolymers such as the Lupron Depot™ (injectable microspheres composed of lactic acid-glycolic acid copolymer and leuprolide acetate), and poly-D-(−)-3-hydroxybutyric acid. While polymers such as ethylene-vinyl acetate and lactic acid-glycolic acid enable release of molecules for over 100 days, certain hydrogels release proteins for shorter time periods. When encapsulated polypeptides remain in the body for a long time, they may denature or aggregate as a result of exposure to moisture at 37° C., resulting in a loss of biological activity and possible changes in immunogenicity. Rational strategies can be devised for stabilization depending on the mechanism involved. For example, if the aggregation mechanism is discovered to be intermolecular S-S bond formation through thio-disulfide interchange, stabilization may be achieved by modifying sulfhydryl residues, lyophilizing from acidic solutions, controlling moisture content, using appropriate additives, and developing specific polymer matrix compositions.

[0744] The formulations of the invention may be designed to be short-acting, fast-releasing, long-acting, or sustained-releasing. Thus, the pharmaceutical formulations may also be formulated for controlled release or for slow release.

[0745] Specific dosages may be adjusted depending on the disease, disorder, or condition to be treated, the age, body weight, general health conditions, sex, and diet of the subject, dose intervals, administration routes, excretion rate, and combinations of drugs.

[0746] The TREM2 agonist antigen binding proteins of the invention can be administered by any suitable means, including parenteral, subcutaneous, intraperitoneal, intrapulmonary, intrathecal, intracerebral, intracerebroventricular, and intranasal, and, if desired for local treatment, intralesional administration. Parenteral administration includes intravenous, intraarterial, intraperitoneal, intramuscular, intradermal or subcutaneous administration. In addition, the antigen binding protein is suitably administered by pulse infusion, particularly with declining doses of the antigen binding protein. Preferably, the dosing is given by injections, most preferably intravenous or subcutaneous injections, depending in part on whether the administration is brief or chronic. Other administration methods are contemplated, including topical, particularly transdermal, transmucosal, rectal, oral or local administration e.g. through a catheter placed close to the desired site. In certain embodiments, the TREM2 agonist antigen binding protein of the invention is administered intravenously or subcutaneously in a physiological solution at a dose ranging between 0.01 mg/kg to 100 mg/kg at a frequency ranging from daily to weekly to monthly (e.g. every day, every other day, every third day, or 2, 3, 4, 5, or 6 times per week), preferably a dose ranging from 0.1 to 45 mg/kg, 0.1 to 15 mg/kg or 0.1 to 10 mg/kg at a frequency of once per week, once every two weeks, or once a month.

[0747] In some embodiments, the anti-TREM2 antibody is administered to a human patient via an IV infusion. In some embodiments, an IV infusion of anti-TREM2 antibody is up to about 5 hours, up to about 4 hours, up to about 3 hours, up to about 2 hours, or up to about 60 minutes. In some embodiments, an IV infusion of anti-TREM2 antibody is from about 5 minutes to about 5 hours, from about 5 minutes to about 4 hours, from about 5 minutes to about 3 hours, from about 5 minutes to about 2 hours, or from about 5 minutes to about 60 minutes. In some embodiments, an IV infusion of anti-TREM2 antibody is about 5 minutes, about 10 minutes, about 15 minutes, about 20 minutes, about 25 minutes, about 30 minutes, about 35 minutes, about 40 minutes, about 45 minutes, about 50 minutes, about 55 minutes, about 60 minutes, about 70 minutes, about 80 minutes, or about 90 minutes.

[0748] In some embodiments, anti-TREM2 antibody is administered to a human patient at a dose of up to about 200 mg/kg. In some embodiments, anti-TREM2 antibody is administered to a human patient at a dose of up to about 150 mg/kg. In some embodiments, anti-TREM2 antibody is administered to a human patient at a dose of up to about 100 mg/kg. In some embodiments, anti-TREM2 antibody is administered to a human patient at a dose of from about 1 mg/kg to about 100 mg/kg, from about 1 mg/kg to about 90 mg/kg, from about 1 mg/kg to about 80 mg/kg, from about 1 mg/kg to about 70 mg/kg, or from about 1 mg/kg to about 60 mg/kg. In some embodiments, anti-TREM2 antibody is administered to a human patient at a dose of about 1 mg/kg, about 2 mg/kg, about 3 mg/kg, about 5 mg/kg, about 10 mg/kg, about 15 mg/kg, about 20 mg/kg, about 25 mg/kg, about 30 mg/kg, about 35 mg/kg, about 40 mg/kg, about 45 mg/kg, about 50 mg/kg, about 55 mg/kg, or about 60 mg/kg.

[0749] In some embodiments, anti-TREM2 antibody is administered to a human patient once daily. In some embodiments, anti-TREM2 antibody is administered to a human patient 1, 2, 3 or 4 times weekly. In some embodiments, anti-TREM2 antibody is administered to a human patient 1, 2, 3 or 4 times monthly. In some embodiments, anti-TREM2 antibody is administered to a human patient once every 1, 2, 3, or 4 weeks. In some embodiments, anti-TREM2 antibody is administered to a human patient once every 2 days, 3 days, 4 days, 5 days, 6 days, 7 days, 8 days, 9 days, 10 days, or 14 days. In some embodiments, anti-TREM2 antibody is administered to a human patient once weekly.

[0750] In some embodiments, the present invention provides a liquid formulation, comprising anti-TREM2 antibody at a concentration of up to about 300 mg/mL. In some embodiments, the present invention provides a liquid formulation, comprising anti-TREM2 antibody at a concentration of up to about 250 mg/mL. In some embodiments, the present invention provides a liquid formulation, comprising anti-TREM2 antibody at a concentration of up to about 200 mg/mL. In some embodiments, the present invention provides a liquid formulation, comprising anti-TREM2 antibody at a concentration of up to about 150 mg/mL. In some embodiments, the present invention provides a liquid formulation, comprising anti-TREM2 antibody at a concentration of about 300 mg/mL, about 250 mg/mL, about 200 mg/mL, about 180 mg/mL, about 170 mg/mL, about 160 mg/mL, about 150 mg/mL, about 140 mg/mL, about 130 mg/mL, about 120 mg/mL, about 110 mg/mL, or about 100 mg/mL. In some embodiments, the present invention provides a liquid formulation, comprising anti-TREM2 antibody at a concentration of about 140 mg/mL. In some embodiments, a method of the invention comprises administering to a human patient a liquid formulation as described herein. In some embodiments, a method of the invention comprises administering to a human patient a liquid formulation, comprising anti-TREM2 antibody at a concentration of about 140 mg/mL.

[0751] The TREM2 agonist antigen binding proteins described herein (e.g. anti-TREM2 agonist monoclonal antibodies and binding fragments thereof) are useful for preventing, treating, or ameliorating a condition associated with TREM2 deficiency or loss of biological function of TREM2 in a patient in need thereof. As used herein, the term “treating” or “treatment” is an intervention performed with the intention of preventing the development or altering the pathology of a disorder. Accordingly, “treatment” refers to both therapeutic treatment and prophylactic or preventative measures. Patients in need of treatment include those already diagnosed with or suffering from the disorder or condition as well as those in which the disorder or condition is to be prevented, such as patients who are at risk of developing the disorder or condition based on, for example, genetic markers. “Treatment” includes any indicia of success in the amelioration of an injury, pathology or condition, including any objective or subjective parameter such as abatement, remission, diminishing of symptoms, or making the injury, pathology or condition more tolerable to the patient, slowing in the rate of degeneration or decline, making the final point of degeneration less debilitating, or improving a patient's physical or mental well-being. The treatment or amelioration of symptoms can be based on objective or subjective parameters, including the results of a physical examination, self-reporting by a patient, cognitive tests, motor function tests, neuropsychiatric exams, and/or a psychiatric evaluation.

### III. Small Molecule TREM2 Agonists

[0752] In some embodiments, the agonist of TREM2 is a small molecule agonist of TREM2.

[0753] In some embodiments, the agonist of TREM2 is a lipid ligand of TREM2. In some embodiments, the lipid ligand of TREM2 is selected from 1-palmitoyl-2-(5′-oxo-valeroyl)-sn-glycero-3-phosphocholine (POVPC), 2-Arachidonoylglycerol (2-AG), 7-ketocholesterol (7-KC), 24(S)hydroxycholesterol (240HC), 25(S)hydroxycholesterol (250HC), 27-hydroxycholesterol (270HC), Acyl Carnitine (AC), alkylacylglycerophosphocholine (PAF), a-galactosylceramide (KRN7000), Bis(monoacylglycero)phosphate (BMP), Cardiolipin (CL), Ceramide, Ceramide-1-phosphate (CIP), Cholesteryl ester (CE), Cholesterol phosphate (CP), Diacylglycerol 34: 1 (DG 34: 1), Diacylglycerol 38:4 (DG 38:4), Diacylglycerol pyrophosphate (DGPP), Dihyrdoceramide (DhCer), Dihydrosphingomyelin (DhSM), Ether phosphatidylcholine (PCe), Free cholesterol (FC), Galactosylceramide (GalCer), Galactosylsphingosine (GalSo), Ganglioside GM1, Ganglioside GM3, Glucosylsphingosine (GlcSo), Hank's Balanced Salt Solution (HBSS), Kdo2-Lipid A (KLA), Lactosylceramide (LacCer), lysoalkylacylglycerophosphocholine (LPAF), Lysophosphatidic acid (LPA), Lysophosphatidylcholine (LPC), Lysophosphatidylethanolamine (LPE), Lysophosphatidylglycerol (LPG), Lysophosphatidylinositol (LPI), Lysosphingomyelin (LSM), Lysophosphatidylserine (LPS), N-Acyl-phosphatidylethanolamine (NAPE), N-Acyl-Serine (NSer), Oxidized phosphatidylcholine (oxPC), Palmitic-acid-9-hydroxy-stearic-acid (PAHSA), Phosphatidylethanolamine (PE), Phosphatidylethanol (PEtOH), Phosphatidic acid (PA), Phosphatidylcholine (PC), Phosphatidylglycerol (PG), Phosphatidylinositol (PI), Phosphatidylserine (PS), Sphinganine, Sphinganine-1-phosphate (SalP), Sphingomyelin (SM), Sphingosine, Sphingosine-1-phosphate (SolP), or Sulfatide, or a salt thereof.

[0754] In some embodiments, the agonist of TREM2 is a lipopolysaccharide.

[0755] In some embodiments, the agonist of TREM2 is a small molecule disclosed in PCT Application Publication WO2019/079529, which is incorporated by reference herein in its entirety. In some embodiments, the agonist of TREM2 is Tyrphostin AG 538, AC1NS458, IN1040, Butein, Okanin, AGL 2263, GB19, GB16, GB20, GB17, GB18, GB21, GB22, GB27, GB44, GB42, GB2, 4,4′-Dihydroxychalcone, or 3,4-Dihydroxybenzophenone, or a derivative or salt of any of the aforementioned.

[0756] In some embodiments, the agonist of TREM2 is a small molecule identified by a method disclosed in PCT Application Publication WO2019/079529. In some embodiments, the small molecule agonist of TREM2 is identified by applying the small molecule compound to a host cell expressing TREM2 and tyrosine kinase binding protein (TYROBP), wherein the host cell has a synthetic sequence comprising an NFAT-response element and a nucleotide sequence encoding a reporter, and measuring a signal emitted by the reporter.

[0757] In some embodiments, the agonist of TREM2 is a small molecule disclosed in PCT Application Publication WO2021/226135 or WO2021/226629.

[0758] In some embodiments, the agonist of TREM2 is a TREM2 agonist compound comprising a bicyclic core. In some embodiments, the bicyclic core is a 10-membered heteroaryl core. In some embodiments, the TREM2 agonist compound comprises a 10-membered heteroaryl core, comprising 1-4 nitrogen atoms as part of the core ring structure. In some embodiments, the TREM2 agonist compound comprises a 10-membered heteroaryl core, comprising 3 or 4 substituent groups.

### IV. Other TREM2 Agonists

[0759] In some embodiments, the agonist of TREM2 is heat shock protein 60 (HSP60).

[0760] In some embodiments, the agonist of TREM2 is apopoliprotein E (ApoE).

### V. Pharmaceutically Acceptable Compositions

[0761] In certain embodiments, a TREM2 activating antibody or small molecule disclosed herein is formulated as a composition for administration to a patient in need of such composition.

[0762] The term “pharmaceutically acceptable carrier, adjuvant, or vehicle” refers to a non-toxic carrier, adjuvant, or vehicle that does not destroy the pharmacological activity of the compound with which it is formulated. Pharmaceutically acceptable carriers, adjuvants or vehicles that may be used in the compositions of this invention include, but are not limited to, ion exchangers, alumina, aluminum stearate, lecithin, serum proteins, such as human serum albumin, buffer substances such as phosphates, glycine, sorbic acid, potassium sorbate, partial glyceride mixtures of saturated vegetable fatty acids, water, salts or electrolytes, such as protamine sulfate, disodium hydrogen phosphate, potassium hydrogen phosphate, sodium chloride, zinc salts, colloidal silica, magnesium trisilicate, polyvinyl pyrrolidone, cellulose-based substances, polyethylene glycol, sodium carboxymethylcellulose, polyacrylates, waxes, polyethylene-polyoxypropylene-block polymers, polyethylene glycol and wool fat.

[0763] A “pharmaceutically acceptable derivative” means any non-toxic salt, ester, salt of an ester or other derivative of a compound of this invention that, upon administration to a recipient, is capable of providing, either directly or indirectly, a compound of this invention or an inhibitorily active metabolite or residue thereof.

[0764] Compositions of the present invention may be administered orally, parenterally, by inhalation spray, topically, rectally, nasally, buccally, vaginally or via an implanted reservoir. The term “parenteral” as used herein includes subcutaneous, intravenous, intramuscular, intra-articular, intra-synovial, intrasternal, intrathecal, intrahepatic, intralesional and intracranial injection or infusion techniques. In some embodiments, the compositions are administered orally, intraperitoneally or intravenously. Sterile injectable forms of the compositions of this invention may be aqueous or oleaginous suspension. These suspensions may be formulated according to techniques known in the art using suitable dispersing or wetting agents and suspending agents. The sterile injectable preparation may also be a sterile injectable solution or suspension in a non-toxic parenterally acceptable diluent or solvent, for example as a solution in 1,3-butanediol. Among the acceptable vehicles and solvents that may be employed are water, Ringer's solution and isotonic sodium chloride solution. In addition, sterile, fixed oils are conventionally employed as a solvent or suspending medium.

[0765] For this purpose, any bland fixed oil may be employed including synthetic mono- or di-glycerides. Fatty acids, such as oleic acid and its glyceride derivatives are useful in the preparation of injectables, as are natural pharmaceutically-acceptable oils, such as olive oil or castor oil, especially in their polyoxyethylated versions. These oil solutions or suspensions may also contain a long-chain alcohol diluent or dispersant, such as carboxymethyl cellulose or similar dispersing agents that are commonly used in the formulation of pharmaceutically acceptable dosage forms including emulsions and suspensions. Other commonly used surfactants, such as Tweens, Spans and other emulsifying agents or bioavailability enhancers which are commonly used in the manufacture of pharmaceutically acceptable solid, liquid, or other dosage forms may also be used for the purposes of formulation.

[0766] Pharmaceutically acceptable compositions of this invention may be orally administered in any orally acceptable dosage form including, but not limited to, capsules, tablets, aqueous suspensions or solutions. In the case of tablets for oral use, carriers commonly used include lactose and corn starch. Lubricating agents, such as magnesium stearate, are also typically added. For oral administration in a capsule form, useful diluents include lactose and dried cornstarch. When aqueous suspensions are required for oral use, the active ingredient is combined with emulsifying and suspending agents. If desired, certain sweetening, flavoring or coloring agents may also be added.

[0767] Alternatively, pharmaceutically acceptable compositions of this invention may be administered in the form of suppositories for rectal administration. These can be prepared by mixing the agent with a suitable non-irritating excipient that is solid at room temperature but liquid at rectal temperature and therefore will melt in the rectum to release the drug. Such materials include cocoa butter, beeswax and polyethylene glycols.

[0768] Pharmaceutically acceptable compositions of this invention may also be administered topically, especially when the target of treatment includes areas or organs readily accessible by topical application, including diseases of the eye, the skin, or the lower intestinal tract. Suitable topical formulations are readily prepared for each of these areas or organs.

[0769] Topical application for the lower intestinal tract can be effected in a rectal suppository formulation (see above) or in a suitable enema formulation. Topically-transdermal patches may also be used.

[0770] For topical applications, provided pharmaceutically acceptable compositions may be formulated in a suitable ointment containing the active component suspended or dissolved in one or more carriers. Carriers for topical administration of compounds of this invention include, but are not limited to, mineral oil, liquid petrolatum, white petrolatum, propylene glycol, polyoxyethylene, polyoxypropylene compound, emulsifying wax and water. Alternatively, provided pharmaceutically acceptable compositions can be formulated in a suitable lotion or cream containing the active components suspended or dissolved in one or more pharmaceutically acceptable carriers. Suitable carriers include, but are not limited to, mineral oil, sorbitan monostearate, polysorbate 60, cetyl esters wax, cetearyl alcohol, 2-octyldodecanol, benzyl alcohol and water.

[0771] For ophthalmic use, provided pharmaceutically acceptable compositions may be formulated as micronized suspensions in isotonic, pH adjusted sterile saline, or as solutions in isotonic, pH adjusted sterile saline, either with or without a preservative such as benzylalkonium chloride. Alternatively, for ophthalmic uses, the pharmaceutically acceptable compositions may be formulated in an ointment such as petrolatum.

[0772] Pharmaceutically acceptable compositions of this invention may also be administered by nasal aerosol or inhalation. Such compositions are prepared according to techniques well-known in the art of pharmaceutical formulation and may be prepared as solutions in saline, employing benzyl alcohol or other suitable preservatives, absorption promoters to enhance bioavailability, fluorocarbons, and/or other conventional solubilizing or dispersing agents.

[0773] In some embodiments, pharmaceutically acceptable compositions of this invention are formulated for oral administration. Such formulations may be administered with or without food. In some embodiments, pharmaceutically acceptable compositions of this invention are administered without food. In other embodiments, pharmaceutically acceptable compositions of this invention are administered with food.

[0774] In other embodiments, pharmaceutically acceptable compositions of this invention are formulated for intravenous (IV) administration.

[0775] The amount of compounds of the present invention that may be combined with the carrier materials to produce a composition in a single dosage form will vary depending upon the host treated, the particular mode of administration. Preferably, provided compositions should be formulated so that a dosage of between 0.01-100 mg/kg body weight/day of the inhibitor can be administered to a patient receiving these compositions.

[0776] It should also be understood that a specific dosage and treatment regimen for any particular patient will depend upon a variety of factors, including the activity of the specific compound employed, the age, body weight, general health, sex, diet, time of administration, rate of excretion, drug combination, and the judgment of the treating physician and the severity of the particular disease being treated. The amount of a compound of the present invention in the composition will also depend upon the particular compound in the composition.

[0777] All features of each of the aspects of the disclosure apply to all other aspects mutatis mutantis. Each of the references referred to herein, including but not limited to patents, patent applications and journal articles, is incorporated by reference herein as though fully set forth in its entirety.

[0778] In order that the disclosure described herein may be more fully understood, the following examples are set forth. It should be understood that these examples are for illustrative purposes only and are not to be construed as limiting this disclosure in any manner.

### EXAMPLES

### General Procedures

### Microglial Differentiation Protocol

[0779] Pluripotent stem cell (PSC) differentiation is induced with mTeSR Custom medium (STEMCELLTechnologies®) containing 80 ng/mL BMP4. At day 4, cells are induced with 25 ng/mL basic fibroblast growth factor, 100 ng/mL stemcell factor (SCF), and 80 ng/mL vascular endothelial growth factor in StemPro-34 SFM (with 2 mM GutaMAX, Life Technologies). Two days later, the medium is supplemented with 50 ng/mL SCF, 50 ng/mL IL-3, 5 ng/mL thrombopoietin, 50 ng/mL macrophage CSF (M-CSF) and 50 ng/mL Flt31, and from day 14 with 50 ng/mL M-CSF, 50 ng/mL Flt31, and 25 ng/mL GMCSF. Between days 25 and 50, CD14+ or CD14+CX3CR1+ progenitors are isolated and plated onto tissue culture-treated dishes or Thermanox plastic coverslips (all from Thermo Fisher Scientific) in Microglial Medium (RPMI-1640 [Life Technologies] with 2 mM GlutaMAX-I, 10 ng/mL GM-CSF, and 100 ng/mL IL-34). Medium is replenished every 3-4 days for at least 2 weeks.

Generation of Induced Pluripotent Stem Cells (iPSCs) from Primary Healthy, Adrenomyeloneuropathy (AMN) and Cerebral Childhood ALD (cALD)Fibroblasts

[0780] Fibroblast cell cultures from healthy individuals (AGO1439, male 3 days old), Adrenomyeloneuropathy (AMN) (GM 07530, male 26 years old) and cALD (GM04934, male 7 years old with VLCFA abnormality and clinical X-ALD disease) patients are obtained. A control human IPSC ATCC-DYRO100 cell line is also obtained. Fibroblasts are cultured in DMEM with 10% FBS, 2 mM L-glutamine and 1% penicillin/streptomycin at 37° C. with 5% CO₂.

[0781] Fibroblast cells seeded at 0.2×106 cells/well of a 6-well plate in fibroblast medium (DMEM+10% FBS) are transduced with six lentiviral vectors designed to deliver human OCT4, SOX2, c-MYC, KLF4, Nanog and Lin28 cDNA sequences. On the next day, fresh fibroblast media is added to the cells 24 hours after transduction. At 48 hours after transduction the media is changed to half E8 medium and half fibroblast medium. When the cells reach about 60% confluence they are transferred to 10 cm Matrigel-coated plates (one well of a 6-well plate into one 10 cm dish) in E8 medium (StemCell Technologies) and media is replaced daily. Between day 15 and day 30 in culture, individual hiPS clones are manually picked using a Leica stereomicroscope. Each hiPS clone is expanded and characterized by immunofluorescence for the expression of Oct4 and Tra-1-60. IPSCs are cultured on a Matrigel (BD-Biosceicnes) coated plate in IPSC medium (mTeSR media from Stemcell technologies, Vancouver, Canada) and media is changed daily until cells are ready for passage.

### Microglia Characterization Assays and Methods

[0782] Microglia are analyzed using flow cytometry, immunohistochemistry and cell quantification procedures such as those disclosed by Masuda et al. (Masuda et al., Nature. 2019; 566: 388-394.)

### Monocyte Derived Macrophage Isolation Protocols

[0783] Monocyte derived macrophages (MDMs) are derived from PBMCs collected from patients with adrenomyeloneuropathy (AMN) or cALD and isolated by magnetic bead separation and differentiation into macrophages as reported in Jin, et al. J Vis Exp. 2016; (112): 54244. CD14+ monocytes are collected for use in the Examples described below.

### Example 1. The Effects of TREM2 Agonists on Microglia after VLCFA Challenge

### Conceptual Basis

[0784] Saturated very long chain fatty acids (VLCFAs; ≥C22:0) accumulate in the microglia of patients suffering from X-linked adrenoleukodystrophy (X-ALD, OMIM 300100), a severe hereditary neurodegenerative disease, due to peroxisomal impairment. Previous studies analysed the development of X-ALD in humans and gene knockout animal models. However, the toxic effect of VLCFA leading to severe symptoms with progressive and multifocal demyelination, adrenal insufficiency and inflammation still remains unclear. To understand the toxic effects of VLCFA in the brain, neural cells are exposed to VLCFA and the effects are analyzed. Oligodendrocytes and astrocytes challenged with docosanoic-(C22:0), tetracosanoic- (C24:0) and hexacosanoic acids (C26:0) die within 24 h. VLCFA-induced depolarization of mitochondria in situ and increased intracellular Ca21 level in all three brain cell types provides indications about the mechanism of toxicity of VLCFA. VLCFAs affect to the largest degree the myelin-producing oligodendrocytes. In isolated mitochondria, VLCFAs exert a detrimental effect by affecting the inner mitochondrial membrane and promoting the permeability transition. Without intending to be limited to any particular theory, it is reasonable to conclude that there is potent toxic activity of VLCFA due to dramatic cell physiological effects with mitochondrial dysfunction and Ca21 deregulation. This provides evidence for mitochondrial-based cell death mechanisms in neurodegenerative diseases with peroxisomal defects and subsequent VLCFA accumulation. Treatment with a TREM2 agonist rescues at least some of the deleterious effects of VLCFA accumulation in microglia, by preventing apoptosis and activating phagocytic mechanisms to clear myelin debris to lower inflammation in the vicinity of axonopathy.

### Experiments

[0785] Healthy patient-derived microglia are plated in 96 well microtiter plates. Each well also contains either a TREM2 agonist (eg. a TREM2 antibody agonist or TREM2 small molecule agonist) or a control compound (eg. an isotype control IgG as a control antibody or DMSO as a control small molecule). An exemplary method uses an immobilized TREM2 antibody agonist in the test wells at 10 pg/well and an isotype control plated in the control wells at 10 pg/well. Another exemplary method uses a solubilized TREM2 antibody agonist or small molecule agonist in the test wells. Cells are maintained in CSF1-containing culture medium (50 ng/mL) for 2 days prior to adding VLCFA (e.g., C26:0, C24:0, C22:0 added at 10-20 uM concentration to culture medium; Hein et al., Human Molecular Genetics. 2008; 17: 1750-176.). After 24 hrs of VLCFA challenge, wells are analyzed microscopically by immunohistochemical staining, e.g., by staining for Iba1, P2YR12 or other myeloid cell surface markers, staining for caspases, which indicate cell apoptosis, and for the number of viable cells as well as for cell morphology. Other microtiter wells can be treated with lysis buffer to collect mRNA for qPCR analysis for markers of myeloid phenotype, such as homeostatic or activated cell states (Keren-Shaul et al., Cell. 2017; 169: 1276-1290; Decskowska et al., Cell. 2018; 173:1073-1081.). Other microtiter wells can be analyzed for total cell death by measuring lactate dehydrogenase levels, a measure of cell lysis, from the culture supernatant (Hein et al., Human Molecular Genetics. 2008; 17: 1750-176.). This experiment can be modified to measure the kinetics of phenotypic transition following the pilot described above by analyzing changes over time and at various doses of VGL101 to understand the dose dependence of rescue. In addition, the Incucyte method of monitoring cell cultures can be used to monitor for morphological changes in real time.

[0786] The above experiments are also repeated using monocytes derived macrophages, in place of the microglia.

### Example 2. The Effects of TREM2 Agonists on Microglia with an ABCD1 Dysfunction

### Conceptual Basis

[0787] Microglia derived from patients suffering from cALD, such as by differentiating patient iPSC or patient monocytes, have transcriptional and biochemical signatures distinct from healthy donor-derived microglia, e.g., potentially enriched for disease associated microglia (DAM). Treatment of cALD patient-derived microglia with VLCFA in vitro will cause toxic and pro-inflammatory effects due to accumulation of fatty acids from dysfunctional peroxisome-mediated metabolism. cALD microglia may also autonomously accumulate VLCFAs without an extracellular challenge. Rescue of the cytotoxicity and inflammatory state by treating with TREM2 agonists during VLCFA challenge can be characterized through transcriptional and biochemical analyses.

### Experiments

[0788] iPSC or monocyte-derived microglia, derived from patients suffering from an ABCD1 dysfunction, such as cALD or AMN, are plated in 96 well microtiter plates. Each well also contains either a TREM2 agonist (eg. a TREM2 antibody agonist or TREM2 small molecule agonist) or a control compound (eg. an isotype control IgG as a control antibody or DMSO as a control small molecule). An exemplary method uses an immobilized TREM2 antibody agonist in the test wells at 10 pg/well and an isotype control plated in the control wells at 10 pg/well. Another exemplary method uses a solubilized TREM2 antibody agonist or small molecule agonist in the test wells. Cells are maintained in a CSF1-containing culture medium (50 ng/mL) for 2 days prior to adding VLCFA (e.g., C26:0, C24:0, C22:0 added at 10-20 uM concentration to culture medium; Hein et al., Human Molecular Genetics. 2008; 17: 1750-176.). Vehicle is added to select wells, in place of the VLCFA. After 24 hrs of challenge, wells are analyzed microscopically by immunohistochemical staining, e.g., by staining for Iba1, PYR12 or other myeloid cell surface markers, staining for caspases, which indicate cell apoptosis, and for the number of viable cells as well as for cell morphology. Other microtiter wells can be treated with lysis buffer to collect mRNA for qPCR analysis for markers of myeloid phenotype, such as homeostatic or activated cell states (Keren-Shaul et al., Cell. 2017; 169: 1276-1290; Decskowska et al., Cell. 2018; 173:1073-1081.). Other microtiter wells can be analyzed for total cell death by measuring lactate dehydrogenase levels, a measure of cell lysis, from the culture supernatant (Hein et al., Human Molecular Genetics. 2008; 17: 1750-176.). This experiment can be modified to measure the kinetics of phenotypic transition following the pilot described above by analyzing changes over time and at various doses of VLCFA or VGL101 to understand the dose dependence of rescue. In addition, the Incucyte method of monitoring cell cultures can be used to monitor for morphological changes in real time.

[0789] The above experiments are also repeated using monocytes derived macrophages, in place of the iPSC or microglia. The above experiments may also be repeated, wherein the VLCFA challenge is replaced with alternative additions known to induce increased accumulation of VLCFAs in cALD microglia. For example, myelin debris or lipids can be added to the wells in place of the VLCFA.

### Example 3. Neurofilament Light Chain as a Biomarker for Tracking x-ALD Treatment Efficacy

[0790] Monitoring of serum from patients with x-ALD for levels of neurofilament light chain (NfL) in order to select patients for treatment, and to monitor the efficacy of treatment will be done as follows. Serum is collected from patients at various time points as required for the use. Serum is stored in sample aliquots at −80° C. When ready for analysis, samples are thawed on ice. Measurement of NfL is determined using an assay run on a Simoa® HD-1 instrument (QUANTERIX) using a 2-step Assay Neat 2.0 protocol; 100 μl of sample or calibrator (diluent: Tris-buffered saline [TBS], 0.1% Tween 20, 1% milk powder, 400 μg/ml Heteroblock [Omega Biologicals, Bozeman, MT]), 25 μl conjugated beads (diluent: TBS, 0.1% Tween 20, 1% milk powder, 300 ug/ml Heteroblock), and 20 μl of mAB2:1 (0.1 pg/ml; diluent: TBS, 0.1% Tween 20, 1% milk powder, 300 ug/ml Heteroblock) are incubated for 47 cadences (1 cadence=45 seconds). After washing, 100 μl of streptavidin-conjugated b-galactosidase (150 μM; Quanterix) is added, followed by a 7-cadence incubation and a wash. Prior to reading, 25 μl resorufin b-D-galactopyranoside (QUANTERIX) is added. Calibrators (neat) and samples (serum: 1:4 dilution) are measured in duplicates. Bovine lyophilized NfL is obtained from UmanDiagnostics. Calibrators ranged from 0 to 2,000 μg/ml for serum and from 0 to 10,000 μg/ml for CSF measurements. Batch prepared calibrators are stored at −80° C. Final NfL levels measured by the above method are used to help both select patients to treat with an agonist of TREM2 and guide response to treatment with an agonist of TREM2.

1. A method of treating a disease or disorder caused by and/or associated with ATP-binding cassette transporter 1 (ABCD1) dysfunction in a human patient, the method comprising administering to the patient an effective amount of an agonist of triggering receptor expressed on myeloid cells 2 (TREM2).

2. The method of claim 1, wherein the disease or disorder is selected from X-linked adrenoleukodystrophy (x-ALD), Globoid cell leukodystrophy, Metachromatic leukodystrophy (MLD), Cerebral autosomal dominant arteriopathy with subcortical infarcts and leukoencephalopathy (CADASIL), Alexander disease, fragile X-associated tremor ataxia syndrome (FXTAS), adult-onset autosomal dominant leukodystrophy (ADLD), and X-linked Charcot-Marie-Tooth disease (CMTX).

3. The method of claim 1, wherein the disease or disorder is selected from Nasu-Hakola disease, Alzheimer's disease, frontotemporal dementia, multiple sclerosis, Guillain-Barre syndrome, amyotrophic lateral sclerosis (ALS), or Parkinson's disease; wherein the patient exhibits ABCD1 dysfunction, and/or has a mutation in a gene affecting the function of ABCD1.

4. The method of claim 1, wherein the disease or disorder is x-ALD.

5. The method of claim 1, wherein the disease or disorder is Addison disease wherein the patient has been found to have a mutation in one or more ABCD1 genes affecting ABCD1 function.

6. The method of claim 1, wherein the administration of the agonist of TREM2 increases microglia function in the patient.

7. The method of claim 1, wherein the agonist of TREM2 activates TREM2/DAP12 signaling in myeloid cells.

8. The method of claim 1, wherein the agonist of TREM2 activates, induces, promotes, stimulates, or otherwise increases one or more TREM2 activities selected from:
(a) TREM2 binding to DAP12; DAP12 binding to TREM2; TREM2 phosphorylation; DAP12 phosphorylation;
(b) PI3K activation;
(c) increased levels of soluble TREM2 (sTREM2);
(d) increased levels of soluble CSF1R (sCSF1R);
(e) increased expression of one or more anti-inflammatory mediators selected from the group consisting of IL-12p70, IL-4, IL-6, and IL-1β;
(f) reduced expression of one or more pro-inflammatory mediators selected from the group consisting of IFN-α4, IFN-b, IL-6, IL-12 p70, IL-12 p40, IL-1β, TNF, TNF-α, IL-1β, IL-8, CRP, TGF-beta members of the chemokine protein families, IL-20 family members, IL-33, LIF, IFN-gamma, OSM, CNTF, TGF-beta, GM-CSF, IL-11, IL-12, IL-17, IL-18, and CRP;
(g) increased expression of one or more chemokines selected from the group consisting of CCL2, CCL4, CXCL10, CCL3 and CST7;
(h) reduced expression of TNF-α, IL-6, or both; extracellular signal-regulated kinase (ERK) phosphorylation; increased expression of C-C chemokine receptor 7 (CCR7);
(i) induction of microglial cell chemotaxis toward CCL19 and CCL21 expressing cells;
(j) an increase, normalization, or both of the ability of bone marrow-derived dendritic cells to induce antigen-specific T-cell proliferation;
(k) induction of osteoclast production, increased rate of osteoclastogenesis, or both; increasing the survival and/or function of one or more of dendritic cells, macrophages, microglial cells, M1 macrophages and/or microglial cells, activated M1 macrophages and/or microglial cells, M2 macrophages and/or microglial cells, monocytes, osteoclasts, Langerhans cells of skin, and Kupffer cells;
(l) induction of one or more types of clearance selected from the group consisting of apoptotic neuron clearance, nerve tissue debris clearance, non-nerve tissue debris clearance, bacteria or other foreign body clearance, disease-causing protein clearance, disease-causing peptide clearance, and disease-causing nucleic acid clearance;
(m) induction of phagocytosis of one or more of apoptotic neurons, nerve tissue debris, non-nerve tissue debris, bacteria, other foreign bodies, disease-causing proteins, disease-causing peptides, or disease-causing nucleic acids; normalization of disrupted TREM2/DAP12-dependent gene expression;
(n) recruitment of Syk, ZAP70, or both to the TREM2/DAP12 complex; Syk phosphorylation; increased expression of CD83 and/or CD86 on dendritic cells, macrophages, monocytes, and/or microglia;
(o) reduced secretion of one or more inflammatory cytokines selected from the group consisting of TNF-α, IL-1β, IL-6, MCP-1, IFN-a4, IFN-b, IL-1β, IL-8, CRP, TGF-beta members of the chemokine protein families, IL-20 family members, IL-33, LIF, IFN-gamma, OSM, CNTF, TGF-beta, GM-CSF, IL-11, IL-12, IL-17, IL-18, and CRP;
(p) reduced expression of one or more inflammatory receptors; increasing phagocytosis by macrophages, dendritic cells, monocytes, and/or microglia under conditions of reduced levels of MCSF;
(q) decreasing phagocytosis by macrophages, dendritic cells, monocytes, and/or microglia in the presence of normal levels of MCSF; increasing activity of one or more TREM2-dependent genes;
(r) increased levels of one or more of CSF1, CSF2 and IL-34; or
(s) any combination thereof.

9. The method of claim 1, wherein the agonist of TREM2 is an antigen binding protein or an antibody, or an antigen-binding fragment thereof.

10. The method of claim 9, wherein the agonist of TREM2 is a monoclonal antibody, a humanized antibody, or a human antibody.

11-12. (canceled)

13. The method of claim 1, wherein the agonist of TREM2 is an antibody or antigen-binding fragment thereof that specifically binds to the polypeptide of SEQ ID NO: 1.

14. The method of claim 13, wherein the antibody or antigen-binding fragment thereof binds specifically to a polypeptide of amino acid residues 19-174 of SEQ ID NO: 1 or a polypeptide of amino acid residues 19-140 of SEQ ID NO: 1.

15. (canceled)

16. The method of claim 1, wherein the agonist of TREM2 is an antibody or antigen-binding fragment thereof comprising a light chain variable region having a CDRL1, CDRL2, and CDRL3 selected from Table EX1 and A10, and a heavy chain variable region having a CDRH1, CDRH2, and CDRH3 selected from Table EX2 and A11.

17. (canceled)

18. The method of claim 16, wherein the TREM2 agonist is an antibody or antigen binding fragment thereof comprising:
(a) a CDRL1, CDRL2, and CDRL3 comprising the sequence of SEQ ID NOs: 8, 22, and 35, respectively, and a CDRH1, CDRH2, and CDRH3 comprising the sequence of SEQ ID NOs: 77, 368, and 98, respectively;
(b) a CDRL1, CDRL2, and CDRL3 comprising the sequence of SEQ ID NOs: 16, 369, and 370, respectively, and a CDRH1, CDRH2, and CDRH3 comprising the sequence of SEQ ID NOs: 85, 371, and 107, respectively;
(c) a CDRL1, CDRL2, and CDRL3 comprising the sequence of SEQ ID NOs: 10, 23, and 372, respectively, and a CDRH1, CDRH2, and CDRH3 comprising the sequence of SEQ ID NOs: 81, 373, and 374, respectively; or
(d) a CDRL1, CDRL2, and CDRL3 comprising the sequence of SEQ ID NOs: 17, 29, and 44, respectively, and a CDRH1, CDRH2, and CDRH3 comprising the sequence of SEQ ID NOs: 86, 94, and 375, respectively.

19. The method of claim 1, wherein the agonist of TREM2 is an antibody or antigen-binding fragment thereof comprising a light chain variable region selected from Table EX1 or A14, and a heavy chain variable region selected from Table EX2 and A15.

20. (canceled)

21. The method of claim 19, wherein the antibody or antigen-binding fragment thereof comprises:
(a) a light chain variable region comprising the amino acid sequence of SEQ ID NO: 326 and a heavy chain variable region comprising the amino acid sequence of SEQ ID NO: 327;
(b) a light chain variable region comprising the amino acid sequence of SEQ ID NO: 328 and a heavy chain variable region comprising the amino acid sequence of SEQ ID NO: 329;
(c) a light chain variable region comprising the amino acid sequence of SEQ ID NO: 330 and a heavy chain variable region comprising the amino acid sequence of SEQ ID NO: 331; or
(d) a light chain variable region comprising the amino acid sequence of SEQ ID NO: 332 and a heavy chain variable region comprising the amino acid sequence of SEQ ID NO: 333.

22. The method of claim 1, wherein the agonist of TREM2 is a small molecule agonist of TREM2.

23. The method of claim 22, wherein the agonist of TREM2 is a lipid ligand of TREM2.

24. The method of claim 23, wherein the agonist of TREM2 is selected from 1-palmitoyl-2-(5′-oxo-valeroyl)-sn-glycero-3-phosphocholine (POVPC), 2-Arachidonoylglycerol (2-AG), 7-ketocholesterol (7-KC), 24(S)hydroxycholesterol (240HC), 25(S)hydroxycholesterol (250HC), 27-hydroxycholesterol (270HC), Acyl Carnitine (AC), alkylacylglycerophosphocholine (PAF), a-galactosylceramide (KRN7000), Bis(monoacylglycero)phosphate (BMP), Cardiolipin (CL), Ceramide, Ceramide-1-phosphate (CIP), Cholesteryl ester (CE), Cholesterol phosphate (CP), Diacylglycerol 34: 1 (DG 34: 1), Diacylglycerol 38:4 (DG 38:4), Diacylglycerol pyrophosphate (DGPP), Dihyrdoceramide (DhCer), Dihydrosphingomyelin (DhSM), Ether phosphatidylcholine (PCe), Free cholesterol (FC), Galactosylceramide (GalCer), Galactosylsphingosine (GalSo), Ganglioside GM1, Ganglioside GM3, Glucosylsphingosine (GlcSo), Hank's Balanced Salt Solution (HBSS), Kdo2-Lipid A (KLA), Lactosylceramide (LacCer), lysoalkylacylglycerophosphocholine (LPAF), Lysophosphatidic acid (LPA), Lysophosphatidylcholine (LPC), Lysophosphatidylethanolamine (LPE), Lysophosphatidylglycerol (LPG), Lysophosphatidylinositol (LPI), Lysosphingomyelin (LSM), Lysophosphatidylserine (LPS), N-Acyl-phosphatidylethanolamine (NAPE), N-Acyl-Serine (NSer), Oxidized phosphatidylcholine (oxPC), Palmitic-acid-9-hydroxy-stearic-acid (PAHSA), Phosphatidylethanolamine (PE), Phosphatidylethanol (PEtOH), Phosphatidic acid (PA), Phosphatidylcholine (PC), Phosphatidylglycerol (PG), Phosphatidylinositol (PI), Phosphatidylserine (PS), Sphinganine, Sphinganine-1-phosphate (SalP), Sphingomyelin (SM), Sphingosine, Sphingosine-1-phosphate (SolP), or Sulfatide, or a salt thereof.

25. (canceled)

26. The method of claim 22, wherein the agonist of TREM2 is selected from Tyrphostin AG 538, AC1NS458, IN1040, Butein, Okanin, AGL 2263, GB19, GB16, GB20, GB17, GB18, GB21, GB22, GB27, GB44, GB42, GB2, 4,4′-Dihydroxychalcone, or 3,4-Dihydroxybenzophenone, or a salt thereof.

27-28. (canceled)

The application's sequence listing, which the Patent Office published only in electronic form, follows.

SEQUENCE LISTING (2781 sequences)

SEQ ID NO: 1 - protein, 230 aa, Homo sapiens
MEPLRLLILLFVTELSGAHNTTVFQGVAGQSLQVSCPYDSMKHWGRRKAWCRQLGEKGPCQRVVSTHNLWLLSFLRRWNGSTAITDDTLGGTLTITLRNLQPHDAGLYQCQSLHGSEADTLRKVLVEVLADPLDHRDAGDLWFPGESESFEDAHVEHSISRSLLEGEIPFPPTSILLLLACIFLIKILAASALWAAAWHGQKPGTHPPSELDCGHDPGYQLQTLPGLRDT

SEQ ID NO: 2 - protein, 174 aa, Homo sapiens
MEPLRLLILLFVTELSGAHNTTVFQGVAGQSLQVSCPYDSMKHWGRRKAWCRQLGEKGPCQRVVSTHNLWLLSFLRRWNGSTAITDDTLGGTLTITLRNLQPHDAGLYQCQSLHGSEADTLRKVLVEVLADPLDHRDAGDLWFPGESESFEDAHVEHSISRSLLEGEIPFPPTS

SEQ ID NO: 3 - protein, 113 aa, Homo sapiens
MGGLEPCSRLLLLPLLLAVSGLRPVQAQAQSDCSCSTVSPGVLAGIVMGDLVLTVLIALAVYFLGRLVPRGRGAAEAATRKQRITETESPYQELQGQRSDVYSDLNTQRPYYK

SEQ ID NO: 4 - protein, 234 aa, Homo sapiens
MRKTRLWGLLWMLFVSELRAATKLTEEKYELKEGQTLDVKCDYTLEKFASSQKAWQIIRDGEMPKTLACTERPSKNSHPVQVGRIILEDYHDHGLLRVRMVNLQVEDSGLYQCVIYQPPKEPHMLFDRIRLVVTKGFSGTPGSNENSTQNVYKIPPTTTKALCPLYTSPRTVTQAPPKSTADVSTPDSEINLTNVTDIIRVPVFNIVILLAGGFLSKSLVFSVLFAVTLRSFVP

SEQ ID NO: 5 - protein, 14 aa, synthetic construct
  REGION 1..14: note = Description of Artificial Sequence: Synthetic peptide
  REGION 1..14: note = CRDL1 Antibody ID 12G10
TLRSGINVGTYRIY

SEQ ID NO: 6 - protein, 11 aa, synthetic construct
  REGION 1..11: note = Description of Artificial Sequence: Synthetic peptide
  REGION 1..11: note = CDRL1 Antibody ID 26C10
SGDKLGDKYVC

SEQ ID NO: 7 - protein, 17 aa, synthetic construct
  REGION 1..17: note = Description of Artificial Sequence: Synthetic peptide
  REGION 1..17: note = CDRL1 Antibody ID 24C12
KSSRSVLYSSNNKNYLA

SEQ ID NO: 8 - protein, 17 aa, synthetic construct
  REGION 1..17: note = Description of Artificial Sequence: Synthetic peptide
  REGION 1..17: note = CDRL1 Antibody ID 24G6
KSSQSVLYSSNNKHFLA

SEQ ID NO: 9 - protein, 17 aa, synthetic construct
  REGION 1..17: note = Description of Artificial Sequence: Synthetic peptide
  REGION 1..17: note = CDRL1 Antibody ID 24A10
KSSHNVLYSSNNKNYLA

SEQ ID NO: 10 - protein, 11 aa, synthetic construct
  REGION 1..11: note = Description of Artificial Sequence: Synthetic peptide
  REGION 1..11: note = CDRL1 Antibody ID 10E3
RASQSVSSNLA

SEQ ID NO: 11 - protein, 11 aa, synthetic construct
  REGION 1..11: note = Description of Artificial Sequence: Synthetic peptide
  REGION 1..11: note = CDRL1 Antibody ID 25F12
RASQSVNNNLA

SEQ ID NO: 12 - protein, 12 aa, synthetic construct
  REGION 1..12: note = Description of Artificial Sequence: Synthetic peptide
  REGION 1..12: note = CDRL1 Antibody ID 32E3
RASQIISSNYLA

SEQ ID NO: 13 - protein, 12 aa, synthetic construct
  REGION 1..12: note = Description of Artificial Sequence: Synthetic peptide
  REGION 1..12: note = CDRL1 Antibody ID 24F4
RASQSVSSSYLA

SEQ ID NO: 14 - protein, 11 aa, synthetic construct
  REGION 1..11: note = Description of Artificial Sequence: Synthetic peptide
  REGION 1..11: note = CDRL1 Antibody ID 16B8
RASQDINSWLA

SEQ ID NO: 15 - protein, 11 aa, synthetic construct
  REGION 1..11: note = Description of Artificial Sequence: Synthetic peptide
  REGION 1..11: note = CDRL1 Antibody ID 4C5
RASQGISNWLA

SEQ ID NO: 16 - protein, 11 aa, synthetic construct
  REGION 1..11: note = Description of Artificial Sequence: Synthetic peptide
  REGION 1..11: note = CDRL1 Antibody ID 6E7
RASQGISSWLA

SEQ ID NO: 17 - protein, 11 aa, synthetic construct
  REGION 1..11: note = Description of Artificial Sequence: Synthetic peptide
  REGION 1..11: note = CDRL1 Antibody ID 5E3
RASQGISNYLA

SEQ ID NO: 18 - protein, 11 aa, synthetic construct
  REGION 1..11: note = Description of Artificial Sequence: Synthetic peptide
  REGION 1..11: note = CDRL1 Antibody ID 4G10
RASQGIRNDLG

SEQ ID NO: 19 - protein, 11 aa, synthetic construct
  REGION 1..11: note = Description of Artificial Sequence: Synthetic peptide
  REGION 1..11: note = CDRL2 Antibody ID 12G10
YKSDSDKQQGS

SEQ ID NO: 20 - protein, 7 aa, synthetic construct
  REGION 1..7: note = Description of Artificial Sequence: Synthetic peptide
  REGION 1..7: note = CDRL2 Antibody ID 26C10
QDSKRPS

SEQ ID NO: 21 - protein, 7 aa, synthetic construct
  REGION 1..7: note = Description of Artificial Sequence: Synthetic peptide
  REGION 1..7: note = CDRL2 Antibody ID 26C10
QDTKRPS

SEQ ID NO: 22 - protein, 7 aa, synthetic construct
  REGION 1..7: note = Description of Artificial Sequence: Synthetic peptide
  REGION 1..7: note = CDRL2 Antibody ID 24C12
WASTRES

SEQ ID NO: 23 - protein, 7 aa, synthetic construct
  REGION 1..7: note = Description of Artificial Sequence: Synthetic peptide
  REGION 1..7: note = CDRL2 Antibody ID 10E3
GASTRAT

SEQ ID NO: 24 - protein, 7 aa, synthetic construct
  REGION 1..7: note = Description of Artificial Sequence: Synthetic peptide
  REGION 1..7: note = CDRL2 Antibody ID 32E3
SASSRAT

SEQ ID NO: 25 - protein, 7 aa, synthetic construct
  REGION 1..7: note = Description of Artificial Sequence: Synthetic peptide
  REGION 1..7: note = CDRL2 Antibody ID 24F4
GASSRAT

SEQ ID NO: 26 - protein, 7 aa, synthetic construct
  REGION 1..7: note = Description of Artificial Sequence: Synthetic peptide
  REGION 1..7: note = CDRL2 Antibody ID 16B8
AASSLQT

SEQ ID NO: 27 - protein, 7 aa, synthetic construct
  REGION 1..7: note = Description of Artificial Sequence: Synthetic peptide
  REGION 1..7: note = CDRL2 Antibody ID 4C5
AASSLQV

SEQ ID NO: 28 - protein, 7 aa, synthetic construct
  REGION 1..7: note = Description of Artificial Sequence: Synthetic peptide
  REGION 1..7: note = CDRL2 Antibody ID 6E7
AASSLQN

SEQ ID NO: 29 - protein, 7 aa, synthetic construct
  REGION 1..7: note = Description of Artificial Sequence: Synthetic peptide
  REGION 1..7: note = CDRL2 Antibody ID 5E3
AASSLQS

SEQ ID NO: 30 - protein, 7 aa, synthetic construct
  REGION 1..7: note = Description of Artificial Sequence: Synthetic peptide
  REGION 1..7: note = CDRL2 Antibody ID 4G10
AASSLPS

SEQ ID NO: 31 - protein, 9 aa, synthetic construct
  REGION 1..9: note = Description of Artificial Sequence: Synthetic peptide
  REGION 1..9: note = CDRL3 Antibody ID 12G10
MIWYSSAVV

SEQ ID NO: 32 - protein, 9 aa, synthetic construct
  REGION 1..9: note = Description of Artificial Sequence: Synthetic peptide
  REGION 1..9: note = CDRL3 Antibody ID 26A10
QAWDSNTVV

SEQ ID NO: 33 - protein, 9 aa, synthetic construct
  REGION 1..9: note = Description of Artificial Sequence: Synthetic peptide
  REGION 1..9: note = CDRL3 Antibody ID 26C10
QAWDSSTVV

SEQ ID NO: 34 - protein, 9 aa, synthetic construct
  REGION 1..9: note = Description of Artificial Sequence: Synthetic peptide
  REGION 1..9: note = CDRL3 Antibody ID 24C12
QQYYITPIT

SEQ ID NO: 35 - protein, 9 aa, synthetic construct
  REGION 1..9: note = Description of Artificial Sequence: Synthetic peptide
  REGION 1..9: note = CDRL3 Antibody ID 24G6
QQYYSTPLT

SEQ ID NO: 36 - protein, 9 aa, synthetic construct
  REGION 1..9: note = Description of Artificial Sequence: Synthetic peptide
  REGION 1..9: note = CDRL3 Antibody 24A10
HQYYSTPCS

SEQ ID NO: 37 - protein, 9 aa, synthetic construct
  REGION 1..9: note = Description of Artificial Sequence: Synthetic peptide
  REGION 1..9: note = CDRL3 Antibody ID 10E3
LQDNNWPPT

SEQ ID NO: 38 - protein, 9 aa, synthetic construct
  REGION 1..9: note = Description of Artificial Sequence: Synthetic peptide
  REGION 1..9: note = CDRL3 Antibody ID 25F12
QQYNNWPRT

SEQ ID NO: 39 - protein, 9 aa, synthetic construct
  REGION 1..9: note = Description of Artificial Sequence: Synthetic peptide
  REGION 1..9: note = CDRL3 Antibody ID 32E3
QQFDSSPIT

SEQ ID NO: 40 - protein, 9 aa, synthetic construct
  REGION 1..9: note = Description of Artificial Sequence: Synthetic peptide
  REGION 1..9: note = CDRL3 Antibody ID 24F4
QQYDTSPFT

SEQ ID NO: 41 - protein, 9 aa, synthetic construct
  REGION 1..9: note = Description of Artificial Sequence: Synthetic peptide
  REGION 1..9: note = CDRL3 Antibody ID 16B8
QQSNSFPIT

SEQ ID NO: 42 - protein, 9 aa, synthetic construct
  REGION 1..9: note = Description of Artificial Sequence: Synthetic peptide
  REGION 1..9: note = CDRL3 Antibody ID 4C5
QQADSFPRN

SEQ ID NO: 43 - protein, 9 aa, synthetic construct
  REGION 1..9: note = Description of Artificial Sequence: Synthetic peptide
  REGION 1..9: note = CDRL3 Antibody ID 6E7
QQADSFPRT

SEQ ID NO: 44 - protein, 9 aa, synthetic construct
  REGION 1..9: note = Description of Artificial Sequence: Synthetic peptide
  REGION 1..9: note = CDRL3 Antibody ID 5E3
QQYSTYPFT

SEQ ID NO: 45 - protein, 9 aa, synthetic construct
  REGION 1..9: note = Description of Artificial Sequence: Synthetic peptide
  REGION 1..9: note = CDRL3 Antibody ID 4G10
LQHNSYPWT

SEQ ID NO: 46 - protein, 115 aa, synthetic construct
  REGION 1..115: note = Description of Artificial Sequence: Synthetic polypeptide
  REGION 1..115: note = VL Amino Acid Sequence Antibody ID 12G10
QAVPTQPSSLSASPGVLASLTCTLRSGINVGTYRIYWYQQKPGSPPQYLLRYKSDSDKQQGSGVPSRFSGSKDASANAGILLISGLQSEDEADYYCMIWYSSAVVFGGGTKLTVL

SEQ ID NO: 47 - protein, 106 aa, synthetic construct
  REGION 1..106: note = Description of Artificial Sequence: Synthetic polypeptide
  REGION 1..106: note = VL Amino Acid Sequence Antibody ID 26A10
SYELTQPPSVSVSPGQTASITCSGDKLGDKYVCWYQQKPGQSPVLVIYQDSKRPSGIPERFSGSNSGNTATLTISGTQAMDEADYYCQAWDSNTVVFGGGTKLTVL

SEQ ID NO: 48 - protein, 106 aa, synthetic construct
  REGION 1..106: note = Description of Artificial Sequence: Synthetic polypeptide
  REGION 1..106: note = VL Amino Acid Sequence Antibody ID 26C10
SFELTQPPSVSVSPGQTASITCSGDKLGDKYVCWYQQKPGQSPMLVIYQDTKRPSGIPERFSGSNSGNTATLTISGTQAMDEADYYCQAWDSSTVVFGGGTKLTVL

SEQ ID NO: 49 - protein, 106 aa, synthetic construct
  REGION 1..106: note = Description of Artificial Sequence: Synthetic polypeptide
  REGION 1..106: note = VL Amino Acid Sequence Antibody ID 26F2
SYELTQPPSVSVSPGQTASITCSGDKLGDKYVCWYQQKPGQSPVLVIFQDSKRPSGIPERFSGSNSGNTATLTISGTQAMDEADYYCQAWDSSTVVFGGGTKLTVL

SEQ ID NO: 50 - protein, 106 aa, synthetic construct
  REGION 1..106: note = Description of Artificial Sequence: Synthetic polypeptide
  REGION 1..106: note = VL Amino Acid Sequence Antibody ID 33B12
SYELTQPPSVSVSPGQTASITCSGDKLGDKYVCWYQQKPGQSPVLVIYQDSKRPSGIPERFSGSNSGNTATLTISGTQAMDEADYYCQAWDSSTVVFGGGTKLTVL

SEQ ID NO: 51 - protein, 113 aa, synthetic construct
  REGION 1..113: note = Description of Artificial Sequence: Synthetic polypeptide
  REGION 1..113: note = VL Amino Acid Sequence Antobody ID 24C12
GIVMTQSPDSLAVSLGERATINCKSSRSVLYSSNNKNYLAWYQQKPGQPPKVLIYWASTRESGVPDRFSGSGSGTDFTLTISSLQAEDVAVYNCQQYYITPITFGQGTRLEIK

SEQ ID NO: 52 - protein, 113 aa, synthetic construct
  REGION 1..113: note = Description of Artificial Sequence: Synthetic polypeptide
  REGION 1..113: note = VL Amino Acid Sequence Antibody ID 24G6
DIVMTQSPDSLAVSLGERATINCKSSQSVLYSSNNKHFLAWYQQKPGQPPKLLIYWASTRESGVPDRFSGSGSGTDFTLTISSLQAEDVAFYYCQQYYSTPLTFGGGTKVEIK

SEQ ID NO: 53 - protein, 113 aa, synthetic construct
  REGION 1..113: note = Description of Artificial Sequence: Synthetic polypeptide
  REGION 1..113: note = VL Amino Acid Sequence Antibody ID 24A10
DIVMTQSPDSLAVSLGERATITCKSSHNVLYSSNNKNYLAWYQQKPGQPPKLLIYWASTRESGVPDRFSGSGSGTDFTLTISSLQAEDVAVYYCHQYYSTPCSFGQGTKLEIK

SEQ ID NO: 54 - protein, 107 aa, synthetic construct
  REGION 1..107: note = Description of Artificial Sequence: Synthetic polypeptide
  REGION 1..107: note = VL Amino Acid Sequence Antibody ID 10E3
EIVMTQSPATLSVSPGERATLSCRASQSVSSNLAWFQQKPGQAPRLLIYGASTRATGIPARFSVSGSGTEFTLTISSLQSEDFAFYYCLQDNNWPPTFGPGTKVDIK

SEQ ID NO: 55 - protein, 107 aa, synthetic construct
  REGION 1..107: note = Description of Artificial Sequence: Synthetic polypeptide
  REGION 1..107: note = VL Amino Acid Sequence Antibody ID 13E7 14C12
EIVMTQSPATLSVSPGERATLSCRASQSVSSNLAWFQQKPGQAPRLLIYGASTRATGIPARFSVSGSGTEFTLTISSLQSEDFAVYYCLQDNNWPPTFGPGTKVDIK

SEQ ID NO: 56 - protein, 107 aa, synthetic construct
  REGION 1..107: note = Description of Artificial Sequence: Synthetic polypeptide
  REGION 1..107: note = VL Amino Acid Sequence Antibody ID 25F12
EKVMTQSPATLSVSPGERATLSCRASQSVNNNLAWYQQKPGQAPRLLIYGASTRATGIPARFSGSGSGTEFTLTISSLQSEDFAVYYCQQYNNWPRTFGQGTKVEIK

SEQ ID NO: 57 - protein, 108 aa, synthetic construct
  REGION 1..108: note = Description of Artificial Sequence: Synthetic polypeptide
  REGION 1..108: note = VL Amino Acid Sequence Antibody ID 25F12
EFVLTQSPGTLSLSPGERATLSCRASQIISSNYLAWYQQKPGQAPRLLIYSASSRATGIPDRFSGSGSGTDFTLTISRLEPEDFAVYYCQQFDSSPITFGRGTRLDIK

SEQ ID NO: 58 - protein, 108 aa, synthetic construct
  REGION 1..108: note = Description of Artificial Sequence: Synthetic polypeptide
  REGION 1..108: note = VL Amino Acid Sequence Antibody ID 24F4
EIVLTQSPGTLSLSPGERATLSCRASQSVSSSYLAWYQQKPGQAPRLLIYGASSRATGIPDRFSGSGSGTDFTLTISRLEPEDFALYYCQQYDTSPFTFGPGTKVDIK

SEQ ID NO: 59 - protein, 107 aa, synthetic construct
  REGION 1..107: note = Description of Artificial Sequence: Synthetic polypeptide
  REGION 1..107: note = VL Amino Acid Sequence Antibody ID 16B8
DIQMTQSPSSVSASVGDRVTVTCRASQDINSWLAWYQQKPGKAPKLLIYAASSLQTGVPSRFSGSGSGTDFTLTISSLQPEDFATYSCQQSNSFPITFGQGTRLEIK

SEQ ID NO: 60 - protein, 107 aa, synthetic construct
  REGION 1..107: note = Description of Artificial Sequence: Synthetic polypeptide
  REGION 1..107: note = VL Amino Acid Sequence Antibody ID 4C5
DIQMTQSPSSVSASVGDRVTITCRASQGISNWLAWYQQKPGKAPKLLIYAASSLQVGVPLRFSGSGSGTDFTLTISSLQPEDFATYYCQQADSFPRNFGQGTKLEIK

SEQ ID NO: 61 - protein, 107 aa, synthetic construct
  REGION 1..107: note = Description of Artificial Sequence: Synthetic polypeptide
  REGION 1..107: note = VL Amino Acid Sequence Antibody ID 6E7
DIQMTQSPSSVSASVGDRVTITCRASQGISSWLAWYQQKPGKAPKLLIYAASSLQNGVPSRFSGSGSGTDFTLTISSLQPEDFATYFCQQADSFPRTFGQGTKLEIK

SEQ ID NO: 62 - protein, 107 aa, synthetic construct
  REGION 1..107: note = Description of Artificial Sequence: Synthetic polypeptide
  REGION 1..107: note = VL Amino Acid Sequence Antibody ID 5E3
DIQMTQSPSSLSASVGDRVTITCRASQGISNYLAWFQQKPGKAPKSLIYAASSLQSGVPSKFSGSGSGTDFTLTISSLQPEDFATYYCQQYSTYPFTFGPGTKVDIK

SEQ ID NO: 63 - protein, 107 aa, synthetic construct
  REGION 1..107: note = Description of Artificial Sequence: Synthetic polypeptide
  REGION 1..107: note = Exemplary Anti-Human TREM2 Antibody Light Chain Variable Region Amino Acid Sequences - VL Amino Acid Sequence
DIQMTQSPSSLSASVGDRVTITCRASQGIRNDLGWYQQKPGNAPKRLIYAASSLPSGVPSRFSGSGSGPEFTLTISSLQPEDFATYYCLQHNSYPWTFGQGTKVEIT

SEQ ID NO: 64 - protein, 113 aa, Homo sapiens
DIVMTQSPDSLAVSLGERATINCKSSQSVLYSSNNKNYLAWYQQKPGQPPKLLIYWASTRESGVPDRFSGSGSGTDFTLTISSLQAEDVAVYYCQQYYSTPITFGQGTRLEIK

SEQ ID NO: 65 - protein, 113 aa, Homo sapiens; identical to SEQ ID NO: 64

SEQ ID NO: 66 - protein, 113 aa, Homo sapiens
DIVMTQSPDSLAVSLGERATINCKSSQSVLYSSNNKNYLAWYQQKPGQPPKLLIYWASTRESGVPDRFSGSGSGTDFTLTISSLQAEDVAVYYCQQYYSTPYTFGQGTKLEIK

SEQ ID NO: 67 - protein, 107 aa, Homo sapiens
EIVMTQSPATLSVSPGERATLSCRASQSVSSNLAWYQQKPGQAPRLLIYGASTRATGIPARFSGSGSGTEFTLTISSLQSEDFAVYYCQQYNNWPFTFGPGTKVDIK

SEQ ID NO: 68 - protein, 107 aa, Homo sapiens
EIVMTQSPATLSVSPGERATLSCRASQSVSSNLAWYQQKPGQAPRLLIYGASTRATGIPARFSGSGSGTEFTLTISSLQSEDFAVYYCQQYNNWPWTFGQGTKVEIK

SEQ ID NO: 69 - protein, 108 aa, Homo sapiens
EIVLTQSPGTLSLSPGERATLSCRASQSVSSSYLAWYQQKPGQAPRLLIYGASSRATGIPDRFSGSGSGTDFTLTISRLEPEDFAVYYCQQYGSSPITFGQGTRLEIK

SEQ ID NO: 70 - protein, 108 aa, Homo sapiens
EIVLTQSPGTLSLSPGERATLSCRASQSVSSSYLAWYQQKPGQAPRLLIYGASSRATGIPDRFSGSGSGTDFTLTISRLEPEDFAVYYCQQYGSSPFTFGPGTKVDIK

SEQ ID NO: 71 - protein, 107 aa, Homo sapiens
DIQMTQSPSSVSASVGDRVTITCRASQGISSWLAWYQQKPGKAPKLLIYAASSLQSGVPSRFSGSGSGTDFTLTISSLQPEDFATYYCQQANSFPITFGQGTRLEIK

SEQ ID NO: 72 - protein, 107 aa, Homo sapiens
DIQMTQSPSSVSASVGDRVTITCRASQGISSWLAWYQQKPGKAPKLLIYAASSLQSGVPSRFSGSGSGTDFTLTISSLQPEDFATYYCQQANSFPYTFGQGTKLEIK

SEQ ID NO: 73 - protein, 107 aa, Homo sapiens
DIQMTQSPSSLSASVGDRVTITCRASQGISNYLAWFQQKPGKAPKSLIYAASSLQSGVPSRFSGSGSGTDFTLTISSLQPEDFATYYCQQYNSYPFTFGPGTKVDIK

SEQ ID NO: 74 - protein, 107 aa, Homo sapiens
DIQMTQSPSSLSASVGDRVTITCRASQGIRNDLGWYQQKPGKAPKRLIYAASSLQSGVPSRFSGSGSGTEFTLTISSLQPEDFATYYCLQHNSYPWTFGQGTKVEIK

SEQ ID NO: 75 - protein, 116 aa, Homo sapiens
QAVLTQPASLSASPGASASLTCTLRSGINVGTYRIYWYQQKPGSPPQYLLRYKSDSDKQQGSGVPSRFSGSKDASANAGILLISGLQSEDEADYYCMIWHSSASVVFGGGTKLTVL

SEQ ID NO: 76 - protein, 107 aa, Homo sapiens
SYELTQPPSVSVSPGQTASITCSGDKLGDKYACWYQQKPGQSPVLVIYQDSKRPSGIPERFSGSNSGNTATLTISGTQAMDEADYYCQAWDSSTAVVFGGGTKLTVL

SEQ ID NO: 77 - protein, 5 aa, synthetic construct
  REGION 1..5: note = Description of Artificial Sequence: Synthetic peptide
  REGION 1..5: note = Exemplary Anti-Human TREM2 Antibody Heavy Chain Variable Region Amino Acid Sequences - CDRH1
SYAMS

SEQ ID NO: 78 - protein, 5 aa, synthetic construct
  REGION 1..5: note = Description of Artificial Sequence: Synthetic peptide
  REGION 1..5: note = CDRH1 Antibody ID 26A10
SFGMS

SEQ ID NO: 79 - protein, 5 aa, synthetic construct
  REGION 1..5: note = Description of Artificial Sequence: Synthetic peptide
  REGION 1..5: note = CDRH1 Antibody ID 24A10
NYAMS

SEQ ID NO: 80 - protein, 5 aa, synthetic construct
  REGION 1..5: note = Description of Artificial Sequence: Synthetic peptide
  REGION 1..5: note = CDRH1 Antibody ID 10E3
NYWIG

SEQ ID NO: 81 - protein, 5 aa, synthetic construct
  REGION 1..5: note = Description of Artificial Sequence: Synthetic peptide
  REGION 1..5: note = CDRH1 Antibody ID 13E7 14C12
SYWIG

SEQ ID NO: 82 - protein, 5 aa, synthetic construct
  REGION 1..5: note = Description of Artificial Sequence: Synthetic peptide
  REGION 1..5: note = CDRH1 Antibody ID 25F12
SYYWS

SEQ ID NO: 83 - protein, 5 aa, synthetic construct
  REGION 1..5: note = Description of Artificial Sequence: Synthetic peptide
  REGION 1..5: note = CDRH1 Antibody 16B8
NYGIS

SEQ ID NO: 84 - protein, 5 aa, synthetic construct
  REGION 1..5: note = Description of Artificial Sequence: Synthetic peptide
  REGION 1..5: note = CDRH1 Antibody ID 4C5
NYWIA

SEQ ID NO: 85 - protein, 5 aa, synthetic construct
  REGION 1..5: note = Description of Artificial Sequence: Synthetic peptide
  REGION 1..5: note = CDRH1 Antibody ID 6E7
SYWIA

SEQ ID NO: 86 - protein, 5 aa, synthetic construct
  REGION 1..5: note = Description of Artificial Sequence: Synthetic peptide
  REGION 1..5: note = CDRH1 Antibody ID 5E3
GYYIH

SEQ ID NO: 87 - protein, 17 aa, synthetic construct
  REGION 1..17: note = Description of Artificial Sequence: Synthetic peptide
  REGION 1..17: note = CDRH2 Antibody ID 12G10 24C12
AIGGGGVSTYCADSVKG

SEQ ID NO: 88 - protein, 17 aa, synthetic construct
  REGION 1..17: note = Description of Artificial Sequence: Synthetic peptide
  REGION 1..17: note = Exemplary Anti-Human TREM2 Antibody Heavy Chain Variable Region Amino Acid Sequences - CDRH2
YISSSSFTIYYADSVKG

SEQ ID NO: 89 - protein, 17 aa, synthetic construct
  REGION 1..17: note = Description of Artificial Sequence: Synthetic peptide
  REGION 1..17: note = CDRH2 Antibidy 26A10
YISKSSFTIYYADSVKG

SEQ ID NO: 90 - protein, 17 aa, synthetic construct
  REGION 1..17: note = Description of Artificial Sequence: Synthetic peptide
  REGION 1..17: note = CDRH2 Antibody ID24G6
AISGSGGSTYYADSVKG

SEQ ID NO: 91 - protein, 17 aa, synthetic construct
  REGION 1..17: note = Description of Artificial Sequence: Synthetic peptide
  REGION 1..17: note = CDRH2 Antibody ID 10E3
IIYPGDSDTRYSPSFQG

SEQ ID NO: 92 - protein, 16 aa, synthetic construct
  REGION 1..16: note = Description of Artificial Sequence: Synthetic peptide
  REGION 1..16: note = CDRH2 Antibody ID 25F12
EINHSGNTNYNPSLKS

SEQ ID NO: 93 - protein, 17 aa, synthetic construct
  REGION 1..17: note = Description of Artificial Sequence: Synthetic peptide
  REGION 1..17: note = CDRH2 Antibody ID 16B8
WISAYNGNTNYAQKLQG

SEQ ID NO: 94 - protein, 17 aa, synthetic construct
  REGION 1..17: note = Description of Artificial Sequence: Synthetic peptide
  REGION 1..17: note = CDRH2 Antibody 4C5
WINPYSGGTTSAQKFQG

SEQ ID NO: 95 - protein, 12 aa, synthetic construct
  REGION 1..12: note = Description of Artificial Sequence: Synthetic peptide
  REGION 1..12: note = CDRH3 Antibody 12G10 24C12
FYIAVAGSHFDY

SEQ ID NO: 96 - protein, 17 aa, synthetic construct
  REGION 1..17: note = Description of Artificial Sequence: Synthetic peptide
  REGION 1..17: note = CDRH3 Antibody ID 26A10
EGGLTMVRGVSSYGLDV

SEQ ID NO: 97 - protein, 17 aa, synthetic construct
  REGION 1..17: note = Description of Artificial Sequence: Synthetic peptide
  REGION 1..17: note = CDRH3 Antibody ID 26C10
EGGITMVRGVSSYGMDV

SEQ ID NO: 98 - protein, 10 aa, synthetic construct
  REGION 1..10: note = Description of Artificial Sequence: Synthetic peptide
  REGION 1..10: note = CDRH3 Antibody ID 24G6
AYTPMAFFDY

SEQ ID NO: 99 - protein, 7 aa, synthetic construct
  REGION 1..7: note = Description of Artificial Sequence: Synthetic peptide
  REGION 1..7: note = CDRH3 Antibody ID 24A10
GGWELFY

SEQ ID NO: 100 - protein, 12 aa, synthetic construct
  REGION 1..12: note = Description of Artificial Sequence: Synthetic peptide
  REGION 1..12: note = CDRH3 Antibody ID 10E3
RRQGIWGDALDI

SEQ ID NO: 101 - protein, 12 aa, synthetic construct
  REGION 1..12: note = Description of Artificial Sequence: Synthetic peptide
  REGION 1..12: note = CDRH3 Antibody ID 13E7 14C12
RRQGIWGDALDF

SEQ ID NO: 102 - protein, 16 aa, synthetic construct
  REGION 1..16: note = Description of Artificial Sequence: Synthetic peptide
  REGION 1..16: note = CDRH3 Antibody ID 25F12
EGYYDILTGYHDAFDI

SEQ ID NO: 103 - protein, 13 aa, synthetic construct
  REGION 1..13: note = Description of Artificial Sequence: Synthetic peptide
  REGION 1..13: note = CDRH3 Antibody ID 32E3
HDIIPAAPGAFDI

SEQ ID NO: 104 - protein, 13 aa, synthetic construct
  REGION 1..13: note = Description of Artificial Sequence: Synthetic peptide
  REGION 1..13: note = CDRH3 Antibody ID 24F4
QAIAVTGLGGFDP

SEQ ID NO: 105 - protein, 10 aa, synthetic construct
  REGION 1..10: note = Description of Artificial Sequence: Synthetic peptide
  REGION 1..10: note = CDRH3 Antibody ID 16B8
RGYSYGSFDY

SEQ ID NO: 106 - protein, 14 aa, synthetic construct
  REGION 1..14: note = Description of Artificial Sequence: Synthetic peptide
  REGION 1..14: note = CDRH3 Antibody ID 4C5
QRTFYYDSSGYFDY

SEQ ID NO: 107 - protein, 14 aa, synthetic construct
  REGION 1..14: note = Description of Artificial Sequence: Synthetic peptide
  REGION 1..14: note = CDRH3 Antibody ID 6E7
QRTFYYDSSDYFDY

SEQ ID NO: 108 - protein, 12 aa, synthetic construct
  REGION 1..12: note = Description of Artificial Sequence: Synthetic peptide
  REGION 1..12: note = CDRH3 Antibody ID 5E3
DGGYLALYGTDV

SEQ ID NO: 109 - protein, 13 aa, synthetic construct
  REGION 1..13: note = Description of Artificial Sequence: Synthetic peptide
  REGION 1..13: note = CDRH3 Antibody ID 4G10
QGIEVTGTGGLDV

SEQ ID NO: 110 - protein, 121 aa, synthetic construct
  REGION 1..121: note = Description of Artificial Sequence: Synthetic polypeptide
  REGION 1..121: note = VH Amino Acid Sequence Antibody ID 12G10 24C12
EVQLLESGGGLVQPGGSLRLSCAASGFTFSSYAMSWVRQAPGKGLEWVSAIGGGGVSTYCADSVKGRFTISRDNSKNTLYLQMNSLRAEDTAVYYCAKFYIAVAGSHFDYWGQGTLVTVSS

SEQ ID NO: 111 - protein, 126 aa, synthetic construct
  REGION 1..126: note = Description of Artificial Sequence: Synthetic polypeptide
  REGION 1..126: note = VH Amino Acid Sequence Antibody ID 26A10
EVQLVESGGALVQRGGSLRLSCAASRFTFSSFGMSWVRQAPGKGLEWVSYISSSSFTIYYADSVKGRFTISRDNAKNSFYLQMNSLRDEDTAVYYCAREGGLTMVRGVSSYGLDVWGQGTTVTVSS

SEQ ID NO: 112 - protein, 126 aa, synthetic construct
  REGION 1..126: note = Description of Artificial Sequence: Synthetic polypeptide
  REGION 1..126: note = VH Amino Acid Sequence Antibody ID 26C10
EVQLVESGGALVQPGGSLRLSCAASGFTFSSFGMSWVRQAPGKGLEWVSYISSSSFTIYYADSVKGRFTISRDNAKNSFYLQMNSLRDEDTAVYFCVREGGITMVRGVSSYGMDVWGQGTTVTVSS

SEQ ID NO: 113 - protein, 126 aa, synthetic construct
  REGION 1..126: note = Description of Artificial Sequence: Synthetic polypeptide
  REGION 1..126: note = VH Amino Acid Sequence Antibody ID 26F2
EVQLVESGGALVQPGGSLRLSCAASGFTFSSFGMSWVRQAPGKGLEWISYISSSSFTIYYADSVKGRFTISRDNAKNSFYLQMNSLRDEDTAVYFCAREGGITMVRGVSSYGMDVWGQGTTVTVSS

SEQ ID NO: 114 - protein, 126 aa, synthetic construct
  REGION 1..126: note = Description of Artificial Sequence: Synthetic polypeptide
  REGION 1..126: note = VH Amino Acid Sequence Antibody ID 33B12
EVQLVESGGALVQPGGSLRLSCAASGFTFSSFGMSWVRQAPGKGLEWVSYISKSSFTIYYADSVKGRFTISRDNAKNSFYLQMNSLRDEDTAVYYCAREGGLTMVRGVSSYGLDVWGQGTTVTVSS

SEQ ID NO: 115 - protein, 119 aa, synthetic construct
  REGION 1..119: note = Description of Artificial Sequence: Synthetic polypeptide
  REGION 1..119: note = VH Amino Acid Sequence Antibody ID 24G6
EVQLLESGGGLVQPGGSLRLSCAASGFTFSSYAMSWVRQAPGKGLEWVSAISGSGGSTYYADSVKGRFTISRDNSKNTLYLQMNSLRAEDTAVYYCAKAYTPMAFFDYWGQGTLVTVSS

SEQ ID NO: 116 - protein, 116 aa, synthetic construct
  REGION 1..116: note = Description of Artificial Sequence: Synthetic polypeptide
  REGION 1..116: note = VH Amino Acid Sequence Antibody ID 24A10
EVQVLESGGGLVQPGGSLRLSCAASGFTFSNYAMSWVRQAPGKGLEWVSAISGSGGSTYYADSVKGRFTISRDNSKNTLYLQMNSLRAEDTAVYYCAKGGWELFYWGQGTLVTVSS

SEQ ID NO: 117 - protein, 121 aa, synthetic construct
  REGION 1..121: note = Description of Artificial Sequence: Synthetic polypeptide
  REGION 1..121: note = VH Amino Acid Sequence Antibody ID 10E3
EVQLVQSGAEVKKPGESLMISCKGSGYSFTNYWIGWVRQMPGKGLEWMGIIYPGDSDTRYSPSFQGQVTISADKSISTAYLQWSSLKASDTAMYFCARRRQGIWGDALDIWGQGTLVTVSS

SEQ ID NO: 118 - protein, 121 aa, synthetic construct
  REGION 1..121: note = Description of Artificial Sequence: Synthetic polypeptide
  REGION 1..121: note = VH Amino Acid Sequence Antibody ID 13E7 14C12
EVQLVQSGAEVKKPGESLMISCKGSGYSFTSYWIGWVRQMPGKGLEWMGIIYPGDSDTRYSPSFQGQVTISADKSISTAYLQWSSLKASDTAMYFCARRRQGIWGDALDFWGQGTLVTVSS

SEQ ID NO: 119 - protein, 124 aa, synthetic construct
  REGION 1..124: note = Description of Artificial Sequence: Synthetic polypeptide
  REGION 1..124: note = VH Amino Acid Sequence Antibody ID 25F12
QVQLQQWGAGLLKPSETLSLTCAVYGGSFSSYYWSWIRQPPGKGLEWIGEINHSGNTNYNPSLKSRVTISVDTSKNQFSLKLSSVTAADTAVYYCAREGYYDILTGYHDAFDIWDQGTMVTVFS

SEQ ID NO: 120 - protein, 122 aa, synthetic construct
  REGION 1..122: note = Description of Artificial Sequence: Synthetic polypeptide
  REGION 1..122: note = VH Amino Acid Sequence Antibody ID 32E3
EVQLVQSGAEVKKPGESLKISCKGSGYSFTSYWIGWVRQMPGKGLEWMGIIYPGDSDTRYSPSFQGQVTISADKSISTAYLQWSTLKASDTAIYYCARHDIIPAAPGAFDIWGQGTMVTVSS

SEQ ID NO: 121 - protein, 122 aa, synthetic construct
  REGION 1..122: note = Description of Artificial Sequence: Synthetic polypeptide
  REGION 1..122: note = VH Amino Acid Sequence Antibody ID 24F4
EVQLVQSGAEVKKPGESLKISCKGSGYTFTSYWIGWVRQMPGKGLEWMGIIYPGDSDTRYSPSFQGQVTISVDKSSSTAYLQWSSLKASDTAIYYCTRQAIAVTGLGGFDPWGQGTLVTVSS

SEQ ID NO: 122 - protein, 119 aa, synthetic construct
  REGION 1..119: note = Description of Artificial Sequence: Synthetic polypeptide
  REGION 1..119: note = VH Amino Acid Sequence Antibody ID 16B8
QVQLVQSGAEVKKPGASVKVSCKASGYTFTNYGISWVRQAPGQGLEWMGWISAYNGNTNYAQKLQGRVTMTTDTSTSTVYMELRSLRSDDTAVYYCARRGYSYGSFDYWGQGTLVTVSS

SEQ ID NO: 123 - protein, 123 aa, synthetic construct
  REGION 1..123: note = Description of Artificial Sequence: Synthetic polypeptide
  REGION 1..123: note = VH Amino Acid Sequence Antibody ID 4C5
EVQLVQSGAEVKKPGESLKISCKGSGHSFTNYWIAWVRQMPGKGLEWMGIIYPGDSDTRYSPSFQGQVTISADKSISTAYLQWSSLKASDTAVYFCARQRTFYYDSSGYFDYWGQGTLVTVSS

SEQ ID NO: 124 - protein, 123 aa, synthetic construct
  REGION 1..123: note = Description of Artificial Sequence: Synthetic polypeptide
  REGION 1..123: note = VH Amino Acid Sequence Antibody ID 6E7
EVQLVQSGAEVKKPGESLKISCKGSGYSFTSYWIAWVRQMPGKGLEWMGIIYPGDSDTRYSPSFQGQVTISADKSISTAYLQWSSLKASDTAMYFCARQRTFYYDSSDYFDYWGQGTLVTVSS

SEQ ID NO: 125 - protein, 121 aa, synthetic construct
  REGION 1..121: note = Description of Artificial Sequence: Synthetic polypeptide
  REGION 1..121: note = VH Amino Acid Sequence Antibody ID 5E3
QVQLVQSGAEVKKPGASVKVSCKASGYTFTGYYIHWVRQAPGLGLEWMGWINPYSGGTTSAQKFQGRVTMTRDTSISSAYMELSRLRSDDTAVYYCARDGGYLALYGTDVWGQGTTVTVSS

SEQ ID NO: 126 - protein, 122 aa, synthetic construct
  REGION 1..122: note = Description of Artificial Sequence: Synthetic polypeptide
  REGION 1..122: note = VH Amino Acid Sequence Antibody ID 4G10
EVQLVQSGAEVKKPGESLKISCKGSGYSFPSYWIAWVRQMPGKGLEWMGIIYPGDSDTRYSPSFQGQVTISADKSISTAFLKWSSLKASDTAMYFCARQGIEVTGTGGLDVWGQGTTVTVSS

SEQ ID NO: 127 - protein, 125 aa, Homo sapiens
EVQLLESGGGLVQPGGSLRLSCAASGFTFSSYAMSWVRQAPGKGLEWVSAISGSGGSTYYADSVKGRFTISRDNSKNTLYLQMNSLRAEDTAVYYCAKYYDYVWGSYRYTYFDYWGQGTLVTVSS

SEQ ID NO: 128 - protein, 121 aa, Homo sapiens
EVQLVESGGGLVQPGGSLRLSCAASGFTFSSYSMNWVRQAPGKGLEWVSYISSSSSTIYYADSVKGRFTISRDNAKNSLYLQMNSLRDEDTAVYYCARLTGYYYYYGMDVWGQGTTVTVSS

SEQ ID NO: 129 - protein, 122 aa, Homo sapiens
EVQLLESGGGLVQPGGSLRLSCAASGFTFSSYAMSWVRQAPGKGLEWVSAISGSGGSTYYADSVKGRFTISRDNSKNTLYLQMNSLRAEDTAVYYCAKAYCGGDCYSYFDYWGQGTLVTVSS

SEQ ID NO: 130 - protein, 120 aa, Homo sapiens
EVQLLESGGGLVQPGGSLRLSCAASGFTFSSYAMSWVRQAPGKGLEWVSAISGSGGSTYYADSVKGRFTISRDNSKNTLYLQMNSLRAEDTAVYYCAKGTTGTAEYFQHWGQGTLVTVSS

SEQ ID NO: 131 - protein, 118 aa, Homo sapiens
EVQLVQSGAEVKKPGESLKISCKGSGYSFTSYWIGWVRQMPGKGLEWMGIIYPGDSDTRYSPSFQGQVTISADKSISTAYLQWSSLKASDTAMYYCARGTTGTYFDYWGQGTLVTVSS

SEQ ID NO: 132 - protein, 118 aa, Homo sapiens
QVQLQQWGAGLLKPSETLSLTCAVYGGSFSGYYWSWIRQPPGKGLEWIGEINHSGSTNYNPSLKSRVTISVDTSKNQFSLKLSSVTAADTAVYYCARYNWNDDAFDIWGQGTMVTVSS

SEQ ID NO: 133 - protein, 121 aa, Homo sapiens
EVQLVQSGAEVKKPGESLKISCKGSGYSFTSYWIGWVRQMPGKGLEWMGIIYPGDSDTRYSPSFQGQVTISADKSISTAYLQWSSLKASDTAMYYCARVDIVATIDAFDIWGQGTMVTVSS

SEQ ID NO: 134 - protein, 121 aa, Homo sapiens
EVQLVQSGAEVKKPGESLKISCKGSGYSFTSYWIGWVRQMPGKGLEWMGIIYPGDSDTRYSPSFQGQVTISADKSISTAYLQWSSLKASDTAMYYCARVDIVATINWFDPWGQGTLVTVSS

SEQ ID NO: 135 - protein, 119 aa, Homo sapiens
QVQLVQSGAEVKKPGASVKVSCKASGYTFTSYGISWVRQAPGQGLEWMGWISAYNGNTNYAQKLQGRVTMTTDTSTSTAYMELRSLRSDDTAVYYCARYSGSYYYFDYWGQGTLVTVSS

SEQ ID NO: 136 - protein, 119 aa, Homo sapiens
EVQLVQSGAEVKKPGESLKISCKGSGYSFTSYWIGWVRQMPGKGLEWMGIIYPGDSDTRYSPSFQGQVTISADKSISTAYLQWSSLKASDTAMYYCARYSGSYYYFDYWGQGTLVTVSS

SEQ ID NO: 137 - protein, 123 aa, Homo sapiens
QVQLVQSGAEVKKPGASVKVSCKASGYTFTGYYMHWVRQAPGQGLEWMGWINPNSGGTNYAQKFQGRVTMTRDTSISTAYMELSRLRSDDTAVYYCARDYGDYYYYYYGMDVWGQGTTVTVSS

SEQ ID NO: 138 - protein, 125 aa, Homo sapiens
EVQLVQSGAEVKKPGESLKISCKGSGYSFTSYWIGWVRQMPGKGLEWMGIIYPGDSDTRYSPSFQGQVTISADKSISTAYLQWSSLKASDTAMYYCARVDIVATIYYYYYGMDVWGQGTTVTVSS

SEQ ID NO: 139 - protein, 7 aa, synthetic construct
  REGION 1..7: note = Description of Artificial Sequence: Synthetic peptide
  REGION 1..7: note = CDRL2 Consensus for 6E7 improved Affinity variants
  VARIANT 1: note = A or G
  VARIANT 5: note = L or R
  VARIANT 7: note = N, K, R, L, or T
XASSXQX

SEQ ID NO: 140 - protein, 9 aa, synthetic construct
  REGION 1..9: note = Description of Artificial Sequence: Synthetic peptide
  REGION 1..9: note = CDRL3 Consensus for 6E7 improved Affinity variants
  VARIANT 1: note = Q or G
  VARIANT 5: note = S or R
  VARIANT 6: note = F, L or Y
  VARIANT 8: note = R or H
XQADXXPXT

SEQ ID NO: 141 - protein, 17 aa, synthetic construct
  REGION 1..17: note = Description of Artificial Sequence: Synthetic peptide
  REGION 1..17: note = CDRH2 Consensus for 6E7 improved Affinity variants
  VARIANT 1: note = I or T
  VARIANT 9: note = T or V
  VARIANT 11: note = Y or L
  VARIANT 12: note = S or A
  VARIANT 14: note = S, G, or E
  VARIANT 17: note = G or D
XIYPGDSDXRXXPXFQX

SEQ ID NO: 142 - protein, 14 aa, synthetic construct
  REGION 1..14: note = Description of Artificial Sequence: Synthetic peptide
  REGION 1..14: note = CDRH3 Consensus for 6E7 improved Affinity variants
  VARIANT 1: note = Q, G, S, or M
  VARIANT 12: note = F or S
XRTFYYDSSDYXDY

SEQ ID NO: 143 - protein, 7 aa, synthetic construct
  REGION 1..7: note = Description of Artificial Sequence: Synthetic peptide
  REGION 1..7: note = CDRL2 Antibody ID V3
AASSRQN

SEQ ID NO: 144 - protein, 7 aa, synthetic construct
  REGION 1..7: note = Description of Artificial Sequence: Synthetic peptide
  REGION 1..7: note = CDRL2 Antibody ID V24 C01
AASSLQK

SEQ ID NO: 145 - protein, 7 aa, synthetic construct
  REGION 1..7: note = Description of Artificial Sequence: Synthetic peptide
  REGION 1..7: note = CDRL2 Antibody ID V27 C04
AASSLQR

SEQ ID NO: 146 - protein, 7 aa, synthetic construct
  REGION 1..7: note = Description of Artificial Sequence: Synthetic peptide
  REGION 1..7: note = CDRL2 Anitbody ID V40 D05
AASSLQL

SEQ ID NO: 147 - protein, 7 aa, synthetic construct
  REGION 1..7: note = Description of Artificial Sequence: Synthetic peptide
  REGION 1..7: note = CDRL2 Antibody ID V84 H01
GASSLQN

SEQ ID NO: 148 - protein, 9 aa, synthetic construct
  REGION 1..9: note = Description of Artificial Sequence: Synthetic peptide
  REGION 1..9: note = CDRL3 Antibody ID V40 D05
QQADRFPRT

SEQ ID NO: 149 - protein, 9 aa, synthetic construct
  REGION 1..9: note = Description of Artificial Sequence: Synthetic peptide
  REGION 1..9: note = CDRL3 Antibody ID V24 C01
QQADSFPHT

SEQ ID NO: 150 - protein, 9 aa, synthetic construct
  REGION 1..9: note = Description of Artificial Sequence: Synthetic peptide
  REGION 1..9: note = CDRL3 Antibody ID V48 E01
QQADSLPRT

SEQ ID NO: 151 - protein, 9 aa, synthetic construct
  REGION 1..9: note = Description of Artificial Sequence: Synthetic peptide
  REGION 1..9: note = CDRL3 Antibody ID V49 E02 V73 G02
QQADSYPRT

SEQ ID NO: 152 - protein, 9 aa, synthetic construct
  REGION 1..9: note = Description of Artificial Sequence: Synthetic peptide
  REGION 1..9: note = CDRL3 Antibody ID V60 F01
GQADSFPRT

SEQ ID NO: 153 - protein, 107 aa, synthetic construct
  REGION 1..107: note = Description of Artificial Sequence: Synthetic polypeptide
  REGION 1..107: note = VL Amino Acid Sequence Antibody ID V3
DIQMTQSPSSVSASVGDRVTITCRASQGISSWLAWYQQKPGKAPKLLIYAASSRQNGVPSRFSGSGSGTDFTLTISSLQPEDFATYFCQQADRFPRTFGQGTKLEIK

SEQ ID NO: 154 - protein, 107 aa, synthetic construct
  REGION 1..107: note = Description of Artificial Sequence: Synthetic polypeptide
  REGION 1..107: note = VL Amino Acid Sequence Antibody ID V24 C01
DIQMTQSPSSVSASVGDRVTITCRASQGISSWLAWYQQKPGKAPKLLIYAASSLQKGVPSRFSGSGSGTDFTLTISSLQPEDFATYFCQQADSFPHTFGQGTKLEIK

SEQ ID NO: 155 - protein, 107 aa, synthetic construct
  REGION 1..107: note = Description of Artificial Sequence: Synthetic polypeptide
  REGION 1..107: note = VL Amino Acid Sequence Antibody ID V27 C04
DIQMTQSPSSVSASVGDRVTITCRASQGISSWLAWYQQKPGKAPKLLIYAASSLQRGVPSRFSGSGSGTDFTLTISSLQPEDFATYFCQQADSFPRTFGQGTKLEIK

SEQ ID NO: 156 - protein, 107 aa, synthetic construct
  REGION 1..107: note = Description of Artificial Sequence: Synthetic polypeptide
  REGION 1..107: note = VL Amino Acid Sequence Antibody ID V40 D05
DIQMTQSPSSVSASVGDRVTITCRASQGISSWLAWYQQKPGKAPKLLIYAASSLQLGVPSRFSGSGSGTDFTLTISSLQPEDFATYFCQQADRFPRTFGQGTKLEIK

SEQ ID NO: 157 - protein, 107 aa, synthetic construct
  REGION 1..107: note = Description of Artificial Sequence: Synthetic polypeptide
  REGION 1..107: note = VL Amino Acid Sequence Antibody ID V48 E01
DIQMTQSPSSVSASVGDRVTITCRASQGISSWLAWYQQKPGKAPKLLIYAASSLQTGVPSRFSGSGSGTDFTLTISSLQPEDFATYFCQQADSLPRTFGQGTKLEIK

SEQ ID NO: 158 - protein, 107 aa, synthetic construct
  REGION 1..107: note = Description of Artificial Sequence: Synthetic polypeptide
  REGION 1..107: note = VL Amino Acid Sequence Antibody ID V49 E02 V73 G02
DIQMTQSPSSVSASVGDRVTITCRASQGISSWLAWYQQKPGKAPKLLIYAASSRQNGVPSRFSGSGSGTDFTLTISSLQPEDFATYFCQQADSYPRTFGQGTKLEIK

SEQ ID NO: 159 - protein, 107 aa, synthetic construct
  REGION 1..107: note = Description of Artificial Sequence: Synthetic polypeptide
  REGION 1..107: note = VL Amino Acid Sequence Antibody ID V52 E05
DIQMTQSPSSVSASVGDRVTITCRASQGISSWLAWYQQKPGKAPKLLIYAASSLQRGVPSRFSGSGSGTDFTLTISSLQPEDFATYFCQQADRFPRTFGQGTKLEIK

SEQ ID NO: 160 - protein, 107 aa, synthetic construct
  REGION 1..107: note = Description of Artificial Sequence: Synthetic polypeptide
  REGION 1..107: note = VL Amino Acid Sequence Antibody ID V60 F01
DIQMTQSPSSVSASVGDRVTITCRASQGISSWLAWYQQKPGKAPKLLIYAASSLQRGVPSRFSGSGSGTDFTLTISSLQPEDFATYFCGQADSFPRTFGQGTKLEIK

SEQ ID NO: 161 - protein, 107 aa, synthetic construct
  REGION 1..107: note = Description of Artificial Sequence: Synthetic polypeptide
  REGION 1..107: note = VL Amino Acid Sequence Antibody ID V76 G05
DIQMTQSPSSVSASVGDRVTITCRASQGISSWLAWYQQKPGKAPKLLIYAASSLQKGVPSRFSGSGSGRDFTLTISSLQPEDFATYFCQQADSFPRTFGQGTKLEIK

SEQ ID NO: 162 - protein, 107 aa, synthetic construct
  REGION 1..107: note = Description of Artificial Sequence: Synthetic polypeptide
  REGION 1..107: note = VL Amino Acid Sequence Antibody ID V84 H01
DIQMTQSPSSVSASVGDRVTITCRASQGISSWLAWYQQKPGKAPKLLIYGASSLQNGVPSRFSGSGSGTDFTLTISSLQPEDFATYFCQQADSFPRTFGQGTKLEIK

SEQ ID NO: 163 - protein, 4 aa, synthetic construct
  REGION 1..4: note = Description of Artificial Sequence: Synthetic peptide
  REGION 1..4: note = FR1/CDRH1 border Antibody ID 6E7
YSFT

SEQ ID NO: 164 - protein, 4 aa, synthetic construct
  REGION 1..4: note = Description of Artificial Sequence: Synthetic peptide
  REGION 1..4: note = Heavy Chain Variable Region Amino Acid Sequences for Reduced Affinity TREM2 Antibodies - FR1/CDRH1 border
YSFA

SEQ ID NO: 165 - protein, 4 aa, synthetic construct
  REGION 1..4: note = Description of Artificial Sequence: Synthetic peptide
  REGION 1..4: note = FR1/CDRH1 border Antibody ID V3 A04
YSFG

SEQ ID NO: 166 - protein, 4 aa, synthetic construct
  REGION 1..4: note = Description of Artificial Sequence: Synthetic peptide
  REGION 1..4: note = FR1/CDRH1 border Antibody ID V49 E02
YSFN

SEQ ID NO: 167 - protein, 4 aa, synthetic construct
  REGION 1..4: note = Description of Artificial Sequence: Synthetic peptide
  REGION 1..4: note = FR1/CDRH1 border Antibody ID V52 E05
YSFE

SEQ ID NO: 168 - protein, 4 aa, synthetic construct
  REGION 1..4: note = Description of Artificial Sequence: Synthetic peptide
  REGION 1..4: note = FR1/CDRH1 border Antibody ID V60 F01
YHFT

SEQ ID NO: 169 - protein, 4 aa, synthetic construct
  REGION 1..4: note = Description of Artificial Sequence: Synthetic peptide
  REGION 1..4: note = FR1/CDRH1 border Antibody ID V76 G05 V84 H01
YGFT

SEQ ID NO: 170 - protein, 17 aa, synthetic construct
  REGION 1..17: note = Description of Artificial Sequence: Synthetic peptide
  REGION 1..17: note = CDRH2 Antibody ID 6E7 V3 A04
IIYPGDSDTRYSPSFQD

SEQ ID NO: 171 - protein, 17 aa, synthetic construct
  REGION 1..17: note = Description of Artificial Sequence: Synthetic peptide
  REGION 1..17: note = CDRH2 Antibody ID V24 C01
IIYPGDSDVRYSPSFQG

SEQ ID NO: 172 - protein, 17 aa, synthetic construct
  REGION 1..17: note = Description of Artificial Sequence: Synthetic peptide
  REGION 1..17: note = CDRH2 Antibody ID V27 C04
IIYPGDSDTRYAPSFQG

SEQ ID NO: 173 - protein, 17 aa, synthetic construct
  REGION 1..17: note = Description of Artificial Sequence: Synthetic peptide
  REGION 1..17: note = CDRH2 Antibody ID V49 E02
TIYPGDSDTRLSPSFQG

SEQ ID NO: 174 - protein, 17 aa, synthetic construct
  REGION 1..17: note = Description of Artificial Sequence: Synthetic peptide
  REGION 1..17: note = CDRH2 Antibody ID V73 G02
IIYPGDSDTRYSPGFQG

SEQ ID NO: 175 - protein, 17 aa, synthetic construct
  REGION 1..17: note = Description of Artificial Sequence: Synthetic peptide
  REGION 1..17: note = CDRH2 Antibody ID V76 G05
IIYPGDSDTRYSPEFQG

SEQ ID NO: 176 - protein, 14 aa, synthetic construct
  REGION 1..14: note = Description of Artificial Sequence: Synthetic peptide
  REGION 1..14: note = CDRH3 Antibody ID V3 A04
GRTFYYDSSDYFDY

SEQ ID NO: 177 - protein, 14 aa, synthetic construct
  REGION 1..14: note = Description of Artificial Sequence: Synthetic peptide
  REGION 1..14: note = CDRH3 Antibody ID V24 C01
SRTFYYDSSDYFDY

SEQ ID NO: 178 - protein, 14 aa, synthetic construct
  REGION 1..14: note = Description of Artificial Sequence: Synthetic peptide
  REGION 1..14: note = CDRH3 Antibody ID V60 F01
QRTFYYDSSDYSDY

SEQ ID NO: 179 - protein, 14 aa, synthetic construct
  REGION 1..14: note = Description of Artificial Sequence: Synthetic peptide
  REGION 1..14: note = CDRH3 Antibody ID V48 E01
MRTFYYDSSDYFDY

SEQ ID NO: 180 - protein, 123 aa, synthetic construct
  REGION 1..123: note = Description of Artificial Sequence: Synthetic polypeptide
  REGION 1..123: note = VH Amino Acid Sequence Antibody ID V3 A04
EVQLVQSGAEVKKPGESLKISCKGSGYSFASYWIAWVRQMPGKGLEWMGIIYPGDSDTRYSPSFQDQVTISADKSISTAYLQWSSLKASDTAMYFCARGRTFYYDSSDYFDYWGQGTLVTVSS

SEQ ID NO: 181 - protein, 123 aa, synthetic construct
  REGION 1..123: note = Description of Artificial Sequence: Synthetic polypeptide
  REGION 1..123: note = VH Amino Acid Sequence Antibody ID V24 C01
EVQLVQSGAEVKKPGESLKISCKGSGYSFTSYWIAWVRQMPGKGLEWMGIIYPGDSDVRYSPSFQGQVTISADKSISTAYLQWSSLKASDTAMYFCARSRTFYYDSSDYFDYWGQGTLVTVSS

SEQ ID NO: 182 - protein, 123 aa, synthetic construct
  REGION 1..123: note = Description of Artificial Sequence: Synthetic polypeptide
  REGION 1..123: note = VH Amino Acid Sequence Antibody ID V27 C04
EVQLVQSGAEVKKPGESLKISCKGSGYSFTSYWIAWVRQMPGKGLEWMGIIYPGDSDTRYAPSFQGQVTISADKSISTAYLQWSSLKASDTAMYFCVRSRTFYYDSSDYFDYWGQGTLVTVSS

SEQ ID NO: 183 - protein, 123 aa, synthetic construct
  REGION 1..123: note = Description of Artificial Sequence: Synthetic polypeptide
  REGION 1..123: note = VH Amino Acid Sequence Antibody ID V40 D05
EVQLVQSGAEVKKPGESLKISCKGSGYSFGSYWIAWVRQMPGKGLEWMGIIYPGDSDVRYSPSFQGQVTISADKSISTAYLQWSSLKASDTAMYFCARQRTFYYDSSDYSDYWGQGTLVTVSS

SEQ ID NO: 184 - protein, 123 aa, synthetic construct
  REGION 1..123: note = Description of Artificial Sequence: Synthetic polypeptide
  REGION 1..123: note = VH Amino Acid Sequence Antibody ID V48 E01
EVQLVQSGAEVKKPGESLKISCKGSGYSFGSYWIAWVRQMPGKGLEWMGIIYPGDSDVRYSPSFQGQVTISADKSISTAYLQWSSLKASDTAMYFCARMRTFYYDSSDYFDYWGQGTLVTVSS

SEQ ID NO: 185 - protein, 123 aa, synthetic construct
  REGION 1..123: note = Description of Artificial Sequence: Synthetic polypeptide
  REGION 1..123: note = Heavy Chain Variable Region Amino Acid Sequences for Improved Affinity TREM2 Antibodies - VH Amino Acid Sequence
EVQLVQSGAEVKKPGESLKISCKGSGYSFNSYWIAWVRQMPGKGLEWMGTIYPGDSDTRLSPSFQGQVTISADKSISTAYLQWSSLKASDTAMYFCARSRTFYYDSSDYFDYWGQGTLVTVSS

SEQ ID NO: 186 - protein, 123 aa, synthetic construct
  REGION 1..123: note = Description of Artificial Sequence: Synthetic polypeptide
  REGION 1..123: note = VH Amino Acid Sequence Antibody ID V49 E02
EVQLVQSGAEVKKPGESLKISCKGSGYSFESYWIAWVRQMPGKGLEWMGIIYPGDSDTRYSPSFQGQVTISADKSISTAYLQWSSLKASDTAMYFCARGRTFYYDSSDYFDYWGQGTLVTVSS

SEQ ID NO: 187 - protein, 123 aa, synthetic construct
  REGION 1..123: note = Description of Artificial Sequence: Synthetic polypeptide
  REGION 1..123: note = VH Amino Acid Sequence Antibody ID V60 F01
EVQLVQSGAEVKKPGESLKISCKGSGYHFTSYWIAWVRQMPGKGLEWMGIIYPGDSDVRYSPSFQGQVTISADKSISTAYLQWSSLKASDTAMYFCARQRTFYYDSSDYSDYWGQGTLVTVSS

SEQ ID NO: 188 - protein, 123 aa, synthetic construct
  REGION 1..123: note = Description of Artificial Sequence: Synthetic polypeptide
  REGION 1..123: note = VH Amino Acid Sequence Antibody ID V73 G02
EVQLVQSGAEVKKPGESLKISCKGSGYSFGSYWIAWVRQMPGKGLEWMGIIYPGDSDTRYSPGFQGQVTISADKSISTAYLQWSSLKASDTAMYFCARGRTFYYDSSDYFDYWGQGTLVTVSS

SEQ ID NO: 189 - protein, 123 aa, synthetic construct
  REGION 1..123: note = Description of Artificial Sequence: Synthetic polypeptide
  REGION 1..123: note = VH Amino Acid Sequence Antibody ID V76 G05
EVQLVQSGAEVKKPGESLKISCKGSGYSFGSYWIAWVRQMPGKGLEWMGIIYPGDSDTRYSPEFQGQVTISADKSISTAYLQWSSLKASDTAMYFCARQRTFYYDSSDYSDYWGQGTLVTVSS

SEQ ID NO: 190 - protein, 123 aa, synthetic construct
  REGION 1..123: note = Description of Artificial Sequence: Synthetic polypeptide
  REGION 1..123: note = VH Amino Acid Sequence Antibody ID V84 H01
EVQLVQSGAEVKKPGESLKISCKGSGYGFTSYWIAWVRQMPGKGLEWMGIIYPGDSDTRYSPSFQGQVTISADKSISTAYLQWSSLKASDTAMYFCARQRTFYYDSSDYSDYWGQGTLVTVSS

SEQ ID NO: 191 - protein, 106 aa, Homo sapiens
GQPKANPTVTLFPPSSEELQANKATLVCLISDFYPGAVTVAWKADGSPVKAGVETTKPSKQSNNKYAASSYLSLTPEQWKSHRSYSCQVTHEGSTVEKTVAPTECS

SEQ ID NO: 192 - protein, 106 aa, Homo sapiens
GQPKAAPSVTLFPPSSEELQANKATLVCLISDFYPGAVTVAWKADSSPVKAGVETTTPSKQSNNKYAASSYLSLTPEQWKSHRSYSCQVTHEGSTVEKTVAPTECS

SEQ ID NO: 193 - protein, 105 aa, Homo sapiens
QPKAAPSVTLFPPSSEELQANKATLVCLISDFYPGAVTVAWKADSSPVKAGVETTTPSKQSNNKYAASSYLSLTPEQWKSHRSYSCQVTHEGSTVEKTVAPTECS

SEQ ID NO: 194 - protein, 106 aa, Homo sapiens
GQPKAAPSVTLFPPSSEELQANKATLVCLISDFYPGAVTVAWKADSSPVKAGVETTTPSKQSNNKYAASSYLSLTPEQWKSHKSYSCQVTHEGSTVEKTVAPTECS

SEQ ID NO: 195 - protein, 106 aa, Homo sapiens
GQPKAAPSVTLFPPSSEELQANKATLVCLVSDFYPGAVTVAWKADGSPVKVGVETTKPSKQSNNKYAASSYLSLTPEQWKSHRSYSCRVTHEGSTVEKTVAPAECS

SEQ ID NO: 196 - protein, 106 aa, Homo sapiens
TVAAPSVFIFPPSDEQLKSGTASVVCLLNNFYPREAKVQWKVDNALQSGNSQESVTEQDSKDSTYSLSSTLTLSKADYEKHKVYACEVTHQGLSSPVTKSFNRGEC

SEQ ID NO: 197 - protein, 107 aa, Homo sapiens [sequence omitted]

SEQ ID NO: 198 - protein, 330 aa, Homo sapiens
ASTKGPSVFPLAPSSKSTSGGTAALGCLVKDYFPEPVTVSWNSGALTSGVHTFPAVLQSSGLYSLSSVVTVPSSSLGTQTYICNVNHKPSNTKVDKKVEPKSCDKTHTCPPCPAPELLGGPSVFLFPPKPKDTLMISRTPEVTCVVVDVSHEDPEVKFNWYVDGVEVHNAKTKPREEQYNSTYRVVSVLTVLHQDWLNGKEYKCKVSNKALPAPIEKTISKAKGQPREPQVYTLPPSREEMTKNQVSLTCLVKGFYPSDIAVEWESNGQPENNYKTTPPVLDSDGSFFLYSKLTVDKSRWQQGNVFSCSVMHEALHNHYTQKSLSLSPGK

SEQ ID NO: 199 - protein, 330 aa, Homo sapiens [sequence omitted]

SEQ ID NO: 200 - protein, 330 aa, Homo sapiens
ASTKGPSVFPLAPSSKSTSGGTAALGCLVKDYFPEPVTVSWNSGALTSGVHTFPAVLQSSGLYSLSSVVTVPSSSLGTQTYICNVNHKPSNTKVDKRVEPKSCDKTHTCPPCPAPELLGGPSVFLFPPKPKDTLMISRTPEVTCVVVDVSHEDPEVKFNWYVDGVEVHNAKTKPREEQYNSTYRVVSVLTVLHQDWLNGKEYKCKVSNKALPAPIEKTISKAKGQPREPQVYTLPPSREEMTKNQVSLTCLVKGFYPSDIAVEWESNGQPENNYKTTPPVLDSDGSFFLYSKLTVDKSRWQQGNVFSCSVMHEALHNHYTQKSLSLSPGK

SEQ ID NO: 201 - protein, 330 aa, Homo sapiens
ASTKGPSVFPLAPSSKSTSGGTAALGCLVKDYFPEPVTVSWNSGALTSGVHTFPAVLQSSGLYSLSSVVTVPSSSLGTQTYICNVNHKPSNTKVDKRVEPKSCDKTHTCPPCPAPELLGGPSVFLFPPKPKDTLMISRTPEVTCVVVDVSHEDPEVKFNWYVDGVEVHNAKTKPREEQYNSTYRVVSVLTVLHQDWLNGKEYKCKVSNKALPAPIEKTISKAKGQPREPQVYTLPPSRDELTKNQVSLTCLVKGFYPSDIAVEWESNGQPENNYKTTPPVLDSDGSFFLYSKLTVDKSRWQQGNVFSCSVMHEALHNHYTQKSLSLSPGK

SEQ ID NO: 202 - protein, 330 aa, Homo sapiens
ASTKGPSVFPLAPSSKSTSGGTAALGCLVKDYFPEPVTVSWNSGALTSGVHTFPAVLQSSGLYSLSSVVTVPSSSLGTQTYICNVNHKPSNTKVDKKVEPKSCDKTHTCPPCPAPELLGGPSVFLFPPKPKDTLMISRTPEVTCVVVDVSHEDPEVKFNWYVDGVEVHNAKTKPREEQYGSTYRVVSVLTVLHQDWLNGKEYKCKVSNKALPAPIEKTISKAKGQPREPQVYTLPPSREEMTKNQVSLTCLVKGFYPSDIAVEWESNGQPENNYKTTPPVLDSDGSFFLYSKLTVDKSRWQQGNVFSCSVMHEALHNHYTQKSLSLSPGK

SEQ ID NO: 203 - protein, 330 aa, Homo sapiens
ASTKGPSVFPLAPSSKSTSGGTAALGCLVKDYFPEPVTVSWNSGALTSGVHTFPAVLQSSGLYSLSSVVTVPSSSLGTQTYICNVNHKPSNTKVDKKVEPKSCDKTHTCPPCPAPELLGGPSVFLFPPKPKDTLMISRTPEVTCVVVDVSHEDPEVKFNWYVDGVEVHNAKTKPCEEQYGSTYRCVSVLTVLHQDWLNGKEYKCKVSNKALPAPIEKTISKAKGQPREPQVYTLPPSREEMTKNQVSLTCLVKGFYPSDIAVEWESNGQPENNYKTTPPVLDSDGSFFLYSKLTVDKSRWQQGNVFSCSVMHEALHNHYTQKSLSLSPGK

SEQ ID NO: 204 - protein, 326 aa, Homo sapiens
ASTKGPSVFPLAPCSRSTSESTAALGCLVKDYFPEPVTVSWNSGALTSGVHTFPAVLQSSGLYSLSSVVTVPSSNFGTQTYTCNVDHKPSNTKVDKTVERKCCVECPPCPAPPVAGPSVFLFPPKPKDTLMISRTPEVTCVVVDVSHEDPEVQFNWYVDGVEVHNAKTKPREEQFNSTFRVVSVLTVVHQDWLNGKEYKCKVSNKGLPAPIEKTISKTKGQPREPQVYTLPPSREEMTKNQVSLTCLVKGFYPSDIAVEWESNGQPENNYKTTPPMLDSDGSFFLYSKLTVDKSRWQQGNVFSCSVMHEALHNHYTQKSLSLSPGK

SEQ ID NO: 205 - protein, 330 aa, Homo sapiens; identical to SEQ ID NO: 203

SEQ ID NO: 206 - protein, 12 aa, Homo sapiens
ERKCCVECPPCP

SEQ ID NO: 207 - protein, 110 aa, Homo sapiens
ASTKGPSVFPLAPCSRSTSESTAALGCLVKDYFPEPVTVSWNSGALTSGVHTFPAVLQSSGLYSLSSVVTVPSSNFGTQTYTCNVDHKPSNTKVDKTVERKCCVECPPCP

SEQ ID NO: 208 - DNA, 345 bp, synthetic construct
  misc_feature 1..345: note = Description of Artificial Sequence: Synthetic polynucleotide
  misc_feature 1..345: note = Anti-TREM2 Antibody Variable Region Nucleic Acid - LV Antibody ID 12G10
  source 1..345: mol_type = other DNA
caggctgtgccgactcagccgtcttccctctctgcatctcctggagtattagccagtctcacctgcaccttacgcagtggcatcaatgttggtacctacaggatatactggtaccagcagaagccagggagtcctccccagtatctcctgaggtacaaatcagactcagataagcagcagggctctggagtccccagccgcttctctggatccaaggatgcttcggccaatgcagggattttactcatctctgggctccagtctgaggatgaggctgactattactgtatgatttggtacagcagtgctgtggtattcggcggagggaccaaactgaccgtccta

SEQ ID NO: 209 - DNA, 318 bp, synthetic construct
  misc_feature 1..318: note = Description of Artificial Sequence: Synthetic polynucleotide
  misc_feature 1..318: note = Anti-TREM2 Antibody Variable Region Nucleic Acid - LV Antibody ID 26A10
  source 1..318: mol_type = other DNA
tcctatgagctgactcagccaccctcagtgtccgtgtccccaggacagacagccagcatcacctgctctggagataaattgggagataagtatgtttgctggtatcagcagaagccaggccagtcccctgtgctggtcatctatcaagatagcaagcggccctcagggatccctgagcgattctctggctccaactctgggaacacagccactctgaccatcagcgggacccaggctatggatgaggctgactattactgtcaggcgtgggacagtaacactgtggtattcggcggagggaccaagctgaccgtccta

SEQ ID NO: 210 - DNA, 318 bp, synthetic construct
  misc_feature 1..318: note = Description of Artificial Sequence: Synthetic polynucleotide
  misc_feature 1..318: note = Anti-TREM2 Antibody Variable Region Nucleic Acid - LV Antibody ID 26C10
  source 1..318: mol_type = other DNA
tcctttgagctgactcagccaccctcagtgtccgtgtccccaggacagacagccagcatcacctgctctggagataaattgggggataagtatgtttgctggtatcagcagaagccaggccagtcccctatgttggtcatctatcaagataccaagcggccctcagggatccctgaacgattctctggctccaactctgggaacacagccactctgaccatcagcgggacccaggctatggatgaggctgactattactgtcaggcgtgggacagcagcactgtggtcttcggcggagggaccaagctgaccgtccta

SEQ ID NO: 211 - DNA, 318 bp, synthetic construct
  misc_feature 1..318: note = Description of Artificial Sequence: Synthetic polynucleotide
  misc_feature 1..318: note = Anti-TREM2 Antibody Variable Region Nucleic Acid - LV Antibody ID 26F2
  source 1..318: mol_type = other DNA
tcctatgagctgactcagccaccctcagtgtccgtgtccccaggacagacagccagcatcacctgctctggagataaattgggggataagtatgtttgctggtatcagcagaagccaggccagtcccctgtgttggtcatctttcaagatagcaagcggccctcagggatccctgagcgattctctggctccaactctgggaacacagccactctgaccatcagcgggacccaggctatggatgaggctgactattactgtcaggcgtgggacagcagcactgtggtattcggcggagggaccaagctgaccgtccta

SEQ ID NO: 212 - DNA, 318 bp, synthetic construct
  misc_feature 1..318: note = Description of Artificial Sequence: Synthetic polynucleotide
  misc_feature 1..318: note = Anti-TREM2 Antibody Variable Region Nucleic Acid - LV Antibody ID 33B12
  source 1..318: mol_type = other DNA
tcctatgagctgactcagccaccctcagtgtccgtgtccccaggacagacagccagcatcacctgctctggagataaattgggggataagtatgtttgctggtatcagcagaagccaggccagtcccctgtgttggtcatctatcaagatagcaagcggccctcagggatccctgagcgattctctggctccaactctgggaacacagccactctgaccatcagcgggacccaggctatggatgaggctgactattactgtcaggcgtgggacagtagcactgtggtattcggcggagggaccaagctgaccgtccta

SEQ ID NO: 213 - DNA, 339 bp, synthetic construct
  misc_feature 1..339: note = Description of Artificial Sequence: Synthetic polynucleotide
  misc_feature 1..339: note = Anti-TREM2 Antibody Variable Region Nucleic Acid - LV Antibody ID 24C12
  source 1..339: mol_type = other DNA
ggcatcgtgatgacccagtctccagactccctggctgtgtctctgggcgagagggccaccatcaactgcaagtccagccggagtgttttgtacagctccaacaataagaactacttagcttggtaccagcagaaaccaggacagcctcctaaggtgctcatttactgggcatctacccgggaatccggggtccctgaccgattcagtggcagcgggtctgggacagatttcactctcaccatcagcagcctgcaggctgaagatgtggcagtttataactgtcagcaatattatattactccgatcaccttcggccaagggacacgactggagattaaa

SEQ ID NO: 214 - DNA, 339 bp, synthetic construct
  misc_feature 1..339: note = Description of Artificial Sequence: Synthetic polynucleotide
  misc_feature 1..339: note = Anti-TREM2 Antibody Variable Region Nucleic Acid - LV Antibody ID 24G6
  source 1..339: mol_type = other DNA
gacatcgtgatgacccagtctccagactccctggctgtgtctctgggcgagagggccaccatcaactgcaagtccagccagagtgttttatacagctccaacaataagcacttcttagcttggtaccagcagaaaccaggacagcctcctaagctgctcatttactgggcatctacccgggagtccggggtccctgaccgattcagtggcagcgggtctgggacagatttcactctcaccatcagcagcctgcaggctgaagatgtggcattttattactgtcagcaatattatagtactccgctcactttcggcggagggaccaaggtggagatcaaa

SEQ ID NO: 215 - DNA, 339 bp, synthetic construct
  misc_feature 1..339: note = Description of Artificial Sequence: Synthetic polynucleotide
  misc_feature 1..339: note = Anti-TREM2 Antibody Variable Region Nucleic Acid - LV Antibody 24A10
  source 1..339: mol_type = other DNA
gacatcgtgatgacccagtctccagactccctggctgtgtctctgggcgagagggccaccatcacctgcaagtccagccacaatgttttatacagctccaacaataagaactacttagcttggtatcagcagaaaccaggacagcctcctaaactgctcatttactgggcatctacccgggaatccggggtccctgaccgattcagtggcagcgggtctgggacagatttcactctcaccatcagcagcctgcaggctgaagatgtggcagtttattactgtcaccaatattatagtactccgtgcagttttggccaggggaccaagctggagatcaaa

SEQ ID NO: 216 - DNA, 321 bp, synthetic construct
  misc_feature 1..321: note = Description of Artificial Sequence: Synthetic polynucleotide
  misc_feature 1..321: note = Anti-TREM2 Antibody Variable Region Nucleic Acid - LV Antibody ID 10E3
  source 1..321: mol_type = other DNA
gaaatagtgatgacgcagtctccagccaccctgtctgtgtctccaggggaaagagccaccctctcctgcagggccagtcagagtgttagcagcaacttagcctggttccagcagaaacctggccaggctcccaggctcctcatctatggtgcttccaccagggccactggtattccagccaggttcagtgtcagtgggtctgggacagagttcactctcaccatcagcagcctgcagtctgaagattttgcattttattactgtctgcaggataataattggcctcccactttcggccctgggaccaaagtggatatcaaa

SEQ ID NO: 217 - DNA, 321 bp, synthetic construct
  misc_feature 1..321: note = Description of Artificial Sequence: Synthetic polynucleotide
  misc_feature 1..321: note = Anti-TREM2 Antibody Variable Region Nucleic Acid - LV Antibody ID 13E7
  source 1..321: mol_type = other DNA
gaaatagtgatgacgcagtctccagccaccctgtctgtgtctccaggggaaagagccaccctctcctgcagggccagtcagagtgttagcagcaacttagcctggttccagcagaaacctggccaggctcccaggctcctcatctatggtgcttccaccagggccactggtattccagccaggttcagtgtcagtgggtctgggacagagttcactctcaccatcagcagcctgcagtctgaagattttgcagtttattactgtctgcaggataataattggcctcccactttcggccctgggaccaaagtggatatcaaa

SEQ ID NO: 218 - DNA, 321 bp, synthetic construct
  misc_feature 1..321: note = Description of Artificial Sequence: Synthetic polynucleotide
  misc_feature 1..321: note = Anti-TREM2 Antibody Variable Region Nucleic Acid - LV Antibody ID 25F12
  source 1..321: mol_type = other DNA
gaaaaagtgatgacgcagtctccagccaccctgtctgtgtctccaggggaaagagccaccctctcctgcagggccagtcagagtgttaacaacaacttagcctggtaccagcagaaacctggccaggctcccaggctcctcatctatggtgcatccaccagggccactggtatcccagccaggttcagtggcagtgggtctgggacagagttcactctcaccatcagcagcctgcagtctgaagattttgcagtttattactgtcagcagtataataactggcctcggacgttcggccaagggaccaaggtggaaatcaaa

SEQ ID NO: 219 - DNA, 324 bp, synthetic construct
  misc_feature 1..324: note = Description of Artificial Sequence: Synthetic polynucleotide
  misc_feature 1..324: note = Anti-TREM2 Antibody Variable Region Nucleic Acid - LV Antibody ID 32E3
  source 1..324: mol_type = other DNA
gaatttgtgttgacgcagtctccaggcaccctgtctttgtctccgggggaaagagccaccctctcctgcagggccagtcagattattagcagcaactacttagcctggtaccagcagaaacctggccaggctcccaggctcctcatctatagtgcatccagcagggccactggcatcccagacaggttcagtggcagtgggtctgggacagacttcactctcaccatcagcagactggagcctgaagattttgcagtgtattactgtcagcagtttgatagctcaccgatcaccttcggccgagggacacgactggacattaaa

SEQ ID NO: 220 - DNA, 324 bp, synthetic construct
  misc_feature 1..324: note = Description of Artificial Sequence: Synthetic polynucleotide
  misc_feature 1..324: note = Anti-TREM2 Antibody Variable Region Nucleic Acid - LV Antibody ID 24F4
  source 1..324: mol_type = other DNA
gaaattgtgttgacgcagtctccaggcaccctgtctttgtctccaggggaaagagccaccctctcctgcagggccagtcagagtgttagcagcagctacttagcctggtaccagcagaaacctggccaggctcccaggctcctcatctatggtgcatccagcagggccactggcatcccagacaggttcagtggcagtgggtctgggacagacttcactctcaccatcagcagactggagcctgaagattttgcactgtattactgtcagcagtatgatacctcaccattcactttcggccctgggaccaaagtggatatcaaa

SEQ ID NO: 221 - DNA, 321 bp, synthetic construct
  misc_feature 1..321: note = Description of Artificial Sequence: Synthetic polynucleotide
  misc_feature 1..321: note = Anti-TREM2 Antibody Variable Region Nucleic Acid - LV Antibody ID 16B8
  source 1..321: mol_type = other DNA
gacatccagatgacccagtctccatcttccgtgtctgcatctgtaggagacagagtcaccgtcacttgtcgggcgagtcaggatattaacagctggttagcctggtatcagcagaaaccagggaaagcccctaagctcctgatctatgctgcatcctctttgcaaactggggtcccttcaaggttcagcggcagtggatctgggacagatttcactctcaccatcagcagcctgcagcctgaagattttgcaacttactcttgtcaacagtctaacagtttcccgatcaccttcggccaagggacacgactggagattaaa

SEQ ID NO: 222 - DNA, 321 bp, synthetic construct
  misc_feature 1..321: note = Description of Artificial Sequence: Synthetic polynucleotide
  misc_feature 1..321: note = Anti-TREM2 Antibody Variable Region Nucleic Acid - LV Antibody ID 4C5
  source 1..321: mol_type = other DNA
gacatccagatgacccagtctccatcttccgtgtctgcatctgtaggagacagagtcaccatcacttgtcgggcgagtcagggtattagcaactggttagcctggtatcagcagaaaccagggaaagcccctaagctcctgatctatgctgcatccagtttgcaagttggggtcccattaaggttcagcggcagtggatctgggacagatttcactctcaccatcagcagcctgcagcctgaagattttgcaacttactattgtcaacaggctgacagtttccctcgcaattttggccaggggaccaagctggagatcaaa

SEQ ID NO: 223 - DNA, 321 bp, synthetic construct
  misc_feature 1..321: note = Description of Artificial Sequence: Synthetic polynucleotide
  misc_feature 1..321: note = Anti-TREM2 Antibody Variable Region Nucleic Acid - LV Antibody ID 6E7 V9 A10 V30 C07 V33 C10 V44 D09 V68 F09
  source 1..321: mol_type = other DNA
gacatccagatgacccagtctccatcttccgtgtctgcatctgtaggagacagagtcaccatcacttgtcgggcgagtcagggtattagcagctggttagcctggtatcagcagaaaccagggaaagcccctaagctcctgatctatgctgcatccagtttgcaaaatggggtcccatcaaggttcagcggcagtggatctgggacagatttcactctcaccatcagcagcctgcagcctgaagattttgcaacttacttttgtcaacaggctgacagtttccctcgcacttttggccaggggaccaagctggagatcaaa

SEQ ID NO: 224 - DNA, 321 bp, synthetic construct
  misc_feature 1..321: note = Description of Artificial Sequence: Synthetic polynucleotide
  misc_feature 1..321: note = Anti-TREM2 Antibody Variable Region Nucleic Acid - LV - Antibody ID 5E3
  source 1..321: mol_type = other DNA
gacatccagatgacccagtctccatcctcactgtctgcatctgtaggagacagagtcaccatcacttgtcgggcgagtcagggcattagcaattatttagcctggtttcagcagaaaccagggaaagcccctaaatccctgatctatgctgcatccagtttgcaaagtggggtcccatcaaagttcagcggcagtggatctgggacagatttcactctcaccatcagcagcctgcagcctgaagattttgcaacttattactgccaacagtatagtacttacccattcactttcggccctgggaccaaagtggatatcaaa

SEQ ID NO: 225 - DNA, 321 bp, synthetic construct
  misc_feature 1..321: note = Description of Artificial Sequence: Synthetic polynucleotide
  misc_feature 1..321: note = Anti-TREM2 Antibody Variable Region Nucleic Acid - LV Antibody ID 4G10
  source 1..321: mol_type = other DNA
gacatccagatgacccagtctccatcctccctgtctgcatctgtaggagacagagtcaccatcacttgccgggcaagtcagggcataagaaatgatttaggctggtatcagcagaaaccagggaatgcccctaagcgcctgatctatgctgcatccagtttgccaagtggggtcccatcaaggttcagcggcagtggatctgggccagaattcactctcacaatcagcagtctgcagcctgaagattttgcaacttattactgtctacagcataatagttacccgtggacgttcggccaagggaccaaggtggaaatcaca

SEQ ID NO: 226 - DNA, 321 bp, synthetic construct
  misc_feature 1..321: note = Description of Artificial Sequence: Synthetic polynucleotide
  misc_feature 1..321: note = Anti-TREM2 Antibody Variable Region Nucleic Acid - LV Antibody ID V3 A04
  source 1..321: mol_type = other DNA
gacatccagatgacccagtctccatcttccgtgtctgcatctgtaggagacagagtcaccatcacttgtcgggcgagtcagggtattagcagctggttagcctggtatcagcagaaaccagggaaagcccctaagctcctgatctatgctgcatccagtaggcaaaatggggtcccatcaaggttcagcggcagtggatctgggacagatttcactctcaccatcagcagcctgcagcctgaagattttgcaacttacttttgtcaacaggctgacaggttccctcgcacttttggccaggggaccaagctggagatcaaa

SEQ ID NO: 227 - DNA, 321 bp, synthetic construct
  misc_feature 1..321: note = Description of Artificial Sequence: Synthetic polynucleotide
  misc_feature 1..321: note = Anti-TREM2 Antibody Variable Region Nucleic Acid - LV Antibody ID V24 C01
  source 1..321: mol_type = other DNA
gacatccagatgacccagtctccatcttccgtgtctgcatctgtaggagacagagtcaccatcacttgtcgggcgagtcagggtattagcagctggttagcctggtatcagcagaaaccagggaaagcccctaagctcctgatctatgctgcatccagtttgcaaaagggggtcccatcaaggttcagcggcagtggatctgggacagatttcactctcaccatcagcagcctgcagcctgaagattttgcaacttacttttgtcaacaggctgacagtttccctcatacttttggccaggggaccaagctggagatcaaa

SEQ ID NO: 228 - DNA, 321 bp, synthetic construct
  misc_feature 1..321: note = Description of Artificial Sequence: Synthetic polynucleotide
  misc_feature 1..321: note = Anti-TREM2 Antibody Variable Region Nucleic Acid - LV Antibody ID V27
  source 1..321: mol_type = other DNA
gacatccagatgacccagtctccatcttccgtgtctgcatctgtaggagacagagtcaccatcacttgtcgggcgagtcagggtattagcagctggttagcctggtatcagcagaaaccagggaaagcccctaagctcctgatctatgctgcatccagtttgcaacgtggggtcccatcaaggttcagcggcagtggatctgggacagatttcactctcaccatcagcagcctgcagcctgaagattttgcaacttacttttgtcaacaggctgacagtttccctcgcacttttggccaggggaccaagctggagatcaaa

SEQ ID NO: 229 - DNA, 321 bp, synthetic construct
  misc_feature 1..321: note = Description of Artificial Sequence: Synthetic polynucleotide
  misc_feature 1..321: note = Anti-TREM2 Antibody Variable Region Nucleic Acid - LV Antibody ID V40 D05
  source 1..321: mol_type = other DNA
gacatccagatgacccagtctccatcttccgtgtctgcatctgtaggagacagagtcaccatcacttgtcgggcgagtcagggtattagcagctggttagcctggtatcagcagaaaccagggaaagcccctaagctcctgatctatgctgcatccagtttgcaacttggggtcccatcaaggttcagcggcagtggatctgggacagatttcactctcaccatcagcagcctgcagcctgaagattttgcaacttacttttgtcaacaggctgaccgtttccctcgcacttttggccaggggaccaagctggagatcaaa

SEQ ID NO: 230 - DNA, 321 bp, synthetic construct
  misc_feature 1..321: note = Description of Artificial Sequence: Synthetic polynucleotide
  misc_feature 1..321: note = Anti-TREM2 Antibody Variable Region Nucleic Acid - LV Antibody ID V48 E01
  source 1..321: mol_type = other DNA
gacatccagatgacccagtctccatcttccgtgtctgcatctgtaggagacagagtcaccatcacttgtcgggcgagtcagggtattagcagctggttagcctggtatcagcagaaaccagggaaagcccctaagctcctgatctatgctgcatccagtttgcaaacgggggtcccatcaaggttcagcggcagtggatctgggacagatttcactctcaccatcagcagcctgcagcctgaagattttgcaacttacttttgtcaacaggctgacagtttgcctcgcacttttggccaggggaccaagctggagatcaaa

SEQ ID NO: 231 - DNA, 321 bp, synthetic construct
  misc_feature 1..321: note = Description of Artificial Sequence: Synthetic polynucleotide
  misc_feature 1..321: note = Anti-TREM2 Antibody Variable Region Nucleic Acid - LV Antibody ID V49 E02
  source 1..321: mol_type = other DNA
gacatccagatgacccagtctccatcttccgtgtctgcatctgtaggagacagagtcaccatcacttgtcgggcgagtcagggtattagcagctggttagcctggtatcagcagaaaccagggaaagcccctaagctcctgatctatgctgcatccagtcggcaaaatggggtcccatcaaggttcagcggcagtggatctgggacagatttcactctcaccatcagcagcctgcagcctgaagattttgcaacttacttttgtcaacaggctgacagttatcctcgcacttttggccaggggaccaagctggagatcaaa

SEQ ID NO: 232 - DNA, 321 bp, synthetic construct
  misc_feature 1..321: note = Description of Artificial Sequence: Synthetic polynucleotide
  misc_feature 1..321: note = Anti-TREM2 Antibody Variable Region Nucleic Acid - LV Antibody ID V52 E05
  source 1..321: mol_type = other DNA
gacatccagatgacccagtctccatcttccgtgtctgcatctgtaggagacagagtcaccatcacttgtcgggcgagtcagggtattagcagctggttagcctggtatcagcagaaaccagggaaagcccctaagctcctgatctatgctgcatccagtttgcaaaggggggtcccatcaaggttcagcggcagtggatctgggacagatttcactctcaccatcagcagcctgcagcctgaagattttgcaacttacttttgtcaacaggctgaccgtttccctcgcacttttggccaggggaccaagctggagatcaaa

SEQ ID NO: 233 - DNA, 321 bp, synthetic construct
  misc_feature 1..321: note = Description of Artificial Sequence: Synthetic polynucleotide
  misc_feature 1..321: note = Anti-TREM2 Antibody Variable Region Nucleic Acid - LV Antibody ID V60 F01
  source 1..321: mol_type = other DNA
gacatccagatgacccagtctccatcttccgtgtctgcatctgtaggagacagagtcaccatcacttgtcgggcgagtcagggtattagcagctggttagcctggtatcagcagaaaccagggaaagcccctaagctcctgatctatgctgcatccagtttgcaaaggggggtcccatcaaggttcagcggcagtggatctgggacagatttcactctcaccatcagcagcctgcagcctgaagattttgcaacttacttttgtgggcaggctgacagtttccctcgcacttttggccaggggaccaagctggagatcaaa

SEQ ID NO: 234 - DNA, 321 bp, synthetic construct
  misc_feature 1..321: note = Description of Artificial Sequence: Synthetic polynucleotide
  misc_feature 1..321: note = Anti-TREM2 Antibody Variable Region Nucleic Acid - LV Antibody ID V73 G02
  source 1..321: mol_type = other DNA
gacatccagatgacccagtctccatcttccgtgtctgcatctgtaggagacagagtcaccatcacttgtcgggcgagtcagggtattagcagctggttagcctggtatcagcagaaaccagggaaagcccctaagctcctgatctatgctgcatccagtcgtcaaaatggggtcccatcaaggttcagcggcagtggatctgggacagatttcactctcaccatcagcagcctgcagcctgaagattttgcaacttacttttgtcaacaggctgacagttatcctcgcacttttggccaggggaccaagctggagatcaaa

SEQ ID NO: 235 - DNA, 321 bp, synthetic construct
  misc_feature 1..321: note = Description of Artificial Sequence: Synthetic polynucleotide
  misc_feature 1..321: note = Anti-TREM2 Antibody Variable Region Nucleic Acid - LV Antibody ID V76 G05
  source 1..321: mol_type = other DNA
gacatccagatgacccagtctccatcttccgtgtctgcatctgtaggagacagagtcaccatcacttgtcgggcgagtcagggtattagcagctggttagcctggtatcagcagaaaccagggaaagcccctaagctcctgatctatgctgcatccagtttgcaaaagggggtcccatcaaggttcagcggcagtggatctgggagagatttcactctcaccatcagcagcctgcagcctgaagattttgcaacttacttttgtcaacaggctgacagtttccctcgcacttttggccaggggaccaagctggagatcaaa

SEQ ID NO: 236 - DNA, 321 bp, synthetic construct
  misc_feature 1..321: note = Description of Artificial Sequence: Synthetic polynucleotide
  misc_feature 1..321: note = Anti-TREM2 Antibody Variable Region Nucleic Acid - LV Antibody ID V84 H01
  source 1..321: mol_type = other DNA
gacatccagatgacccagtctccatcttccgtgtctgcatctgtaggagacagagtcaccatcacttgtcgggcgagtcagggtattagcagctggttagcctggtatcagcagaaaccagggaaagcccctaagctcctgatctatggtgcatccagtttgcaaaatggggtcccatcaaggttcagcggcagtggatctgggacagatttcactctcaccatcagcagcctgcagcctgaagattttgcaacttacttttgtcaacaggctgacagtttcccgcgcacttttggccaggggaccaagctggagatcaaa

SEQ ID NO: 237 - DNA, 363 bp, synthetic construct
  misc_feature 1..363: note = Description of Artificial Sequence: Synthetic polynucleotide
  misc_feature 1..363: note = Anti-TREM2 Antibody Variable Region Nucleic Acid - HV Antibody ID 12G10 24C12
  source 1..363: mol_type = other DNA
gaggtgcagctgttggagtctgggggaggcttggtacagcctggggggtccctgagactctcctgtgcagcctctggattcacctttagcagctatgccatgagctgggtccgccaggctccagggaaggggctggagtgggtctcagctattggtggtggtggtgttagcacatactgcgcagactccgtgaagggccggttcaccatctccagagacaattccaagaatacgctgtatctgcaaatgaacagcctgagagccgaggacacggccgtatattactgtgcgaaattttatatagcagtggctggttctcactttgactactggggccagggaaccctggtcaccgtctcctca

SEQ ID NO: 238 - DNA, 378 bp, synthetic construct
  misc_feature 1..378: note = Description of Artificial Sequence: Synthetic polynucleotide
  misc_feature 1..378: note = Anti-TREM2 Antibody Variable Region Nucleic Acid - HV Antibody ID 26A10
  source 1..378: mol_type = other DNA
gaggtgcaactggtggagtctgggggagccttggtacagcggggggggtccctgagactctcctgtgcagcctctagattcaccttcagtagctttggcatgagctgggtccgccaggctccagggaaggggctggagtgggtttcatacattagtagtagtagttttaccatatattacgcagactctgtgaagggccgattcaccatctccagagacaatgccaagaattcattctatctgcaaatgaacagcctgagagacgaggacacggctgtgtattactgtgcgagagaggggggtcttactatggttcggggagtctcttcctacggtttggacgtctggggccaagggaccacggtcaccgtctcctca

SEQ ID NO: 239 - DNA, 378 bp, synthetic construct
  misc_feature 1..378: note = Description of Artificial Sequence: Synthetic polynucleotide
  misc_feature 1..378: note = Anti-TREM2 Antibody Variable Region Nucleic Acid - HV 26C10
  source 1..378: mol_type = other DNA
gaggtgcaactggtggagtctgggggagccttggtacagcctggggggtccctgagactctcctgtgcagcctctggattcaccttcagtagctttggcatgagctgggtccgccaggctccagggaaggggctggagtgggtttcatacattagtagtagtagttttaccatatactacgcagactctgtgaagggccgattcaccatctccagagacaatgccaagaattcgttctatctgcaaatgaacagcctgagagacgaggacacggctgtgtatttctgtgtgagagaggggggtataactatggttcggggagtctcttcctacggtatggacgtctggggccaagggaccacggtcaccgtctcctca

SEQ ID NO: 240 - DNA, 378 bp, synthetic construct
  misc_feature 1..378: note = Description of Artificial Sequence: Synthetic polynucleotide
  misc_feature 1..378: note = Anti-TREM2 Antibody Variable Region Nucleic Acid - HV Antibody ID 26F2
  source 1..378: mol_type = other DNA
gaggtgcaactggtggagtctgggggagccttggtacagcctggggggtccctgagactctcctgtgcagcctctggattcaccttcagtagctttggcatgagctgggtccgccaggctccagggaaggggctggagtggatttcatacattagtagtagtagttttaccatatactacgcagactctgtgaagggccgattcaccatctccagagacaatgccaagaattcattctatctgcaaatgaacagcctgagagacgaggacacggctgtgtatttctgtgcgagagaggggggtattactatggttcggggagtctcttcctacggtatggacgtctggggccaagggaccacggtcaccgtctcctca

SEQ ID NO: 241 - DNA, 378 bp, synthetic construct
  misc_feature 1..378: note = Description of Artificial Sequence: Synthetic polynucleotide
  misc_feature 1..378: note = Anti-TREM2 Antibody Variable Region Nucleic Acid - HV Antibody ID 33B12
  source 1..378: mol_type = other DNA
gaggtgcaactggtggagtctgggggagccttggtacagcctggggggtccctgagactctcctgtgcagcctctggattcaccttcagtagctttggcatgagctgggtccgccaggctccagggaagggcctggagtgggtttcatacattagtaaaagtagttttaccatatactacgcagactctgtgaagggccgattcaccatctccagagacaatgccaagaattcattctatctgcaaatgaacagcctgagagacgaggacacggctgtgtattactgtgcgagagaggggggtcttactatggttcggggagtctcttcctacggtttggacgtctggggccaagggaccacggtcaccgtctcctca

SEQ ID NO: 242 - DNA, 357 bp, synthetic construct
  misc_feature 1..357: note = Description of Artificial Sequence: Synthetic polynucleotide
  misc_feature 1..357: note = Anti-TREM2 Antibody Variable Region Nucleic Acid - HV Antibody ID 24G6
  source 1..357: mol_type = other DNA
gaggtgcagctgttggagtctgggggaggcttggtacagcctggggggtccctgagactctcctgtgcagcctctggattcacctttagcagctatgccatgagctgggtccgccaggctccagggaagggactggagtgggtctcagctattagtggtagtggtggtagcacatactacgcagactccgtgaagggccggttcaccatctccagagacaattccaagaacacgctgtatctgcaaatgaacagcctgagagccgaggacacggccgtatattactgtgcgaaggcgtatacacctatggcattctttgactactggggccagggaaccctggtcaccgtctcctca

SEQ ID NO: 243 - DNA, 348 bp, synthetic construct
  misc_feature 1..348: note = Description of Artificial Sequence: Synthetic polynucleotide
  misc_feature 1..348: note = Anti-TREM2 Antibody Variable Region Nucleic Acid - HV Antibody ID 24A10
  source 1..348: mol_type = other DNA
gaggtgcaggtgttggagtctgggggaggcttggtacagcctggggggtccctgagactctcctgtgcagcctctggattcacctttagcaactatgccatgagctgggtccgccaggctccagggaaggggctggagtgggtctcagctattagtggtagtggtggtagcacatactacgcagactccgtgaagggccggttcaccatctccagagacaattccaagaacacgctgtatctgcaaatgaacagcctgagagccgaggacacggccgtatattactgtgcgaaaggagggtgggagctattttactggggccagggaaccctggtcaccgtctcctca

SEQ ID NO: 244 - DNA, 363 bp, synthetic construct
  misc_feature 1..363: note = Description of Artificial Sequence: Synthetic polynucleotide
  misc_feature 1..363: note = Anti-TREM2 Antibody Variable Region Nucleic Acid - HV Antibody ID 10E3
  source 1..363: mol_type = other DNA
gaggtgcagctggtgcagtctggagcagaggtgaaaaagcccggggagtctctgatgatctcctgtaagggttctggatacagctttaccaactactggatcggctgggtgcgccagatgcccgggaaaggcctggagtggatggggatcatctatcctggagactctgataccagatacagcccgtccttccaaggccaggtcaccatctcagccgacaagtccatcagcaccgcctacctgcagtggagcagcctgaaggcctcggacaccgccatgtatttctgtgcgagacggagacaggggatctggggtgatgctcttgatatctggggccaagggacattggtcaccgtctcttca

SEQ ID NO: 245 - DNA, 363 bp, synthetic construct
  misc_feature 1..363: note = Description of Artificial Sequence: Synthetic polynucleotide
  misc_feature 1..363: note = Anti-TREM2 Antibody Variable Region Nucleic Acid - HV Antibody ID 13E7
  source 1..363: mol_type = other DNA
gaggtgcagctggtgcagtctggagcagaggtgaaaaagcccggggagtctctgatgatctcctgtaagggttctggatacagctttaccagctactggatcggctgggtgcgccagatgcccgggaaaggcctggagtggatggggatcatctatcctggagactctgataccagatacagcccgtccttccaaggccaggtcaccatctcagccgacaagtccatcagcaccgcctacctgcagtggagcagcctgaaggcctcggacaccgccatgtatttctgtgcgagacggagacaggggatctggggtgatgctcttgatttctggggccaagggacattggtcaccgtctcttca

SEQ ID NO: 246 - DNA, 372 bp, synthetic construct
  misc_feature 1..372: note = Description of Artificial Sequence: Synthetic polynucleotide
  misc_feature 1..372: note = Anti-TREM2 Antibody Variable Region Nucleic Acid - HV Antibody ID 25F12
  misc_difference 366: note = a, c, g, or t
  source 1..372: mol_type = other DNA
caggtgcagctacagcagtggggcgcaggactgttgaagccttcggagaccctgtccctcacctgcgctgtctatggtgggtccttcagtagttactactggagctggatccgccagcccccagggaaggggctggagtggattggggaaatcaatcatagtggaaacaccaactacaacccgtccctcaagagtcgagtcaccatatcagtagacacgtccaagaaccagttctccctgaagctgagctctgtgaccgccgcggacacggctgtgtattactgtgcgagagaggggtattacgatatcttgactggttatcatgatgcttttgatatttgggaccaagggacaatggtcaccgtnttttca

SEQ ID NO: 247 - DNA, 366 bp, synthetic construct
  misc_feature 1..366: note = Description of Artificial Sequence: Synthetic polynucleotide
  misc_feature 1..366: note = Anti-TREM2 Antibody Variable Region Nucleic Acid - HV Antibody ID 32E3
  source 1..366: mol_type = other DNA
gaggtgcagctggtgcagtctggagcagaggtgaaaaagcccggggagtctctgaagatctcctgtaagggttctggatacagctttaccagctactggatcggctgggtgcgccagatgcccgggaaaggcctggagtggatggggatcatctatcctggtgactctgataccagatacagcccgtccttccaaggccaggtcaccatctcagccgacaagtccatcagcaccgcctacctgcagtggagcaccctgaaggcctcggacaccgccatatattactgtgcgcgacatgacattataccagcagcccctggtgcttttgatatctggggccaagggacaatggtcaccgtctcttca

SEQ ID NO: 248 - DNA, 366 bp, synthetic construct
  misc_feature 1..366: note = Description of Artificial Sequence: Synthetic polynucleotide
  misc_feature 1..366: note = Anti-TREM2 Antibody Variable Region Nucleic Acid - HV Antibody ID 24F4
  source 1..366: mol_type = other DNA
gaggtgcagctggtgcagtctggagcagaggtgaaaaagcccggggagtctctgaagatctcctgtaagggttctggatacacctttaccagctactggatcggctgggtgcgccagatgcccgggaaaggcctggagtggatggggatcatctatcctggtgactctgataccagatacagcccgtccttccaaggccaggtcaccatctcagtcgacaagtccagcagcaccgcctacctgcagtggagcagcctgaaggcctcggacaccgccatatattactgtacgagacaggccatagcagtgactggtttggggggtttcgacccctggggccagggaaccctggtcaccgtctcctca

SEQ ID NO: 249 - DNA, 357 bp, synthetic construct
  misc_feature 1..357: note = Description of Artificial Sequence: Synthetic polynucleotide
  misc_feature 1..357: note = Anti-TREM2 Antibody Variable Region Nucleic Acid - HV Antibody ID 16B8
  source 1..357: mol_type = other DNA
caggttcagctggtgcagtctggagctgaggtgaagaagcctggggcctcagtgaaggtctcctgcaaggcttctggttacacctttaccaactatggtatcagctgggtgcgacaggcccctggacaagggcttgagtggatgggatggatcagcgcttacaatggtaacacaaactatgcacagaagctccagggcagagtcaccatgaccacagacacatccacgagtacagtctacatggagctgaggagcctgagatctgacgacacggccgtgtattactgtgcgagacggggatacagctatggttcctttgactactggggccagggaaccctggtcaccgtctcctca

SEQ ID NO: 250 - DNA, 369 bp, synthetic construct
  misc_feature 1..369: note = Description of Artificial Sequence: Synthetic polynucleotide
  misc_feature 1..369: note = Anti-TREM2 Antibody Variable Region Nucleic Acid - HV Antibody ID 4C5
  source 1..369: mol_type = other DNA
gaggtgcagctggtgcagtctggagcagaagtgaaaaagcccggggagtctctgaagatctcctgtaagggttctggacacagttttaccaactactggatcgcctgggtgcgccagatgcccgggaaaggcctggagtggatggggatcatctatcctggtgactctgataccagatacagcccgtccttccaaggccaggtcaccatctcagccgacaagtccatcagcaccgcctacctgcagtggagcagcctgaaggcctcggacaccgccgtgtatttctgtgcgagacaaaggacgttttactatgatagtagtggttattttgactactggggccagggaaccctggtcaccgtctcctca

SEQ ID NO: 251 - DNA, 369 bp, synthetic construct
  misc_feature 1..369: note = Description of Artificial Sequence: Synthetic polynucleotide
  misc_feature 1..369: note = Anti-TREM2 Antibody Variable Region Nucleic Acid - HV Antibody ID 6E7
  source 1..369: mol_type = other DNA
gaggtgcagctggtgcagtctggagcagaggtgaaaaagcccggggagtctctgaagatctcctgtaagggttctggatacagttttaccagctactggatcgcctgggtgcgccagatgcccgggaaaggcctggagtggatggggatcatctatcctggtgactctgataccagatacagcccgtccttccaaggccaggtcaccatctcagccgacaagtccatcagcaccgcctacctacagtggagcagcctgaaggcctcggacaccgccatgtatttctgtgcgagacaaaggacgttttattatgatagtagtgattattttgactactggggccagggaaccctggtcaccgtctcctca

SEQ ID NO: 252 - DNA, 363 bp, synthetic construct
  misc_feature 1..363: note = Description of Artificial Sequence: Synthetic polynucleotide
  misc_feature 1..363: note = Anti-TREM2 Antibody Variable Region Nucleic Acid - HV Antibody ID 5E3
  source 1..363: mol_type = other DNA
caggtgcagctggtgcagtctggggctgaggtgaagaagcctggggcctcagtgaaggtctcctgcaaggcttctggatacaccttcaccggctactatatacactgggtgcgacaggcccctggactagggcttgagtggatgggatggatcaacccttacagtggtggcacaacctctgcacagaagtttcagggcagggtcaccatgaccagggacacgtccatcagctcagcctacatggaactgagcaggctgagatctgacgacacggccgtgtattactgtgcgagagatggaggctacctggccctctacggtacggacgtctggggccaagggaccacggtcaccgtctcctca

SEQ ID NO: 253 - DNA, 366 bp, synthetic construct
  misc_feature 1..366: note = Description of Artificial Sequence: Synthetic polynucleotide
  misc_feature 1..366: note = Anti-TREM2 Antibody Variable Region Nucleic Acid - HV Antibody ID 4G10
  source 1..366: mol_type = other DNA
gaggtgcagctggtgcagtctggagcagaggtgaaaaagcccggggagtctctgaagatctcctgtaagggttctggatacagctttcccagctactggatcgcctgggtgcgccagatgcccgggaaaggcctggagtggatggggatcatctatcctggtgactctgataccagatacagcccgtccttccaaggccaggtcaccatctcagccgacaagtccatcagcaccgcctttttgaagtggagtagcctgaaggcctcggacaccgccatgtatttctgtgcgcgacagggtatagaagtgactggtacgggaggtttggacgtctggggccaagggaccacggtcaccgtctcctca

SEQ ID NO: 254 - DNA, 369 bp, synthetic construct
  misc_feature 1..369: note = Description of Artificial Sequence: Synthetic polynucleotide
  misc_feature 1..369: note = Anti-TREM2 Antibody Variable Region Nucleic Acid - HV Antibody ID V3 A04
  source 1..369: mol_type = other DNA
gaggtgcagctggtgcagtctggagcagaggtgaaaaagcccggggagtctctgaagatctcctgtaagggttctggatacagttttgcgagctactggatcgcctgggtgcgccagatgcccgggaaaggcctggagtggatggggatcatctatcctggtgactctgataccagatacagcccgtccttccaagatcaggtcaccatctcagccgacaagtccatcagcaccgcctacctacagtggagcagcctgaaggcctcggacaccgccatgtatttctgtgcgagagggaggacgttttattatgatagtagtgattattttgactactggggccagggaaccctggtcaccgtgtcctca

SEQ ID NO: 255 - DNA, 369 bp, synthetic construct
  misc_feature 1..369: note = Description of Artificial Sequence: Synthetic polynucleotide
  misc_feature 1..369: note = Anti-TREM2 Antibody Variable Region Nucleic Acid - HV Antibody ID V24 C01
  source 1..369: mol_type = other DNA
gaggtgcagctggtgcagtctggagcagaggtgaaaaagcccggggagtctctgaagatctcctgtaagggttctggatacagttttaccagctactggattgcctgggtgcgccagatgcccgggaaaggcctggagtggatggggatcatctatcctggtgactctgatgtgagatacagcccgtccttccaaggccaggtcaccatctcagccgacaagtccatcagcaccgcctacctacagtggagcagcctgaaggcctcggacaccgccatgtatttctgtgcgagatctaggacgttttattatgatagtagtgattattttgactactggggccagggaaccctggtcaccgtgtcctca

SEQ ID NO: 256 - DNA, 369 bp, synthetic construct
  misc_feature 1..369: note = Description of Artificial Sequence: Synthetic polynucleotide
  misc_feature 1..369: note = Anti-TREM2 Antibody Variable Region Nucleic Acid - HV Antibody ID V27 C04
  source 1..369: mol_type = other DNA
gaggtgcagctggtgcagtctggagcagaggtgaaaaagcccggggagtctctgaagatctcctgtaagggttctggatacagttttaccagctactggatcgcctgggtgcgccagatgcccgggaaaggcctggagtggatggggatcatctatcctggtgactctgataccagatacgctccgtccttccaaggccaggtcaccatctcagccgacaagtccatcagcaccgcctacctacagtggagcagcctgaaggcctcggacaccgccatgtatttctgtgtgagaagtaggacgttttattatgatagtagtgattattttgactactggggccagggaaccctggtcaccgtgtcctca

SEQ ID NO: 257 - DNA, 369 bp, synthetic construct
  misc_feature 1..369: note = Description of Artificial Sequence: Synthetic polynucleotide
  misc_feature 1..369: note = Anti-TREM2 Antibody Variable Region Nucleic Acid - HV Antibody ID V40 D05
  source 1..369: mol_type = other DNA
gaggtgcagctggtgcagtctggagcagaggtgaaaaagcccggggagtctctgaagatctcctgtaagggttctggatacagttttgggagctactggatcgcctgggtgcgccagatgcccgggaaaggcctggagtggatggggatcatctatcctggtgactctgatgttagatacagcccgtccttccaaggccaggtcaccatctcagccgacaagtccatcagcaccgcctacctacagtggagcagcctgaaggcctcggacaccgccatgtatttctgtgcgagacaaaggacgttttattatgatagtagtgattattcggactactggggccagggaaccctggtcaccgtgtcctca

SEQ ID NO: 258 - DNA, 369 bp, synthetic construct
  misc_feature 1..369: note = Description of Artificial Sequence: Synthetic polynucleotide
  misc_feature 1..369: note = Anti-TREM2 Antibody Variable Region Nucleic Acid - HV Antibody ID V48 E01
  source 1..369: mol_type = other DNA
gaggtgcagctggtgcagtctggagcagaggtgaaaaagcccggggagtctctgaagatctcctgtaagggttctggatacagttttggtagctactggatcgcctgggtgcgccagatgcccgggaaaggcctggagtggatggggatcatctatcctggtgactctgatgtgagatacagcccgtccttccaaggccaggtcaccatctcagccgacaagtccatcagcaccgcctacctacagtggagcagcctgaaggcctcggacaccgccatgtatttctgtgcgagaatgaggacgttttattatgatagtagtgattattttgactactggggccagggaaccctggtcaccgtgtcctca

SEQ ID NO: 259 - DNA, 369 bp, synthetic construct
  misc_feature 1..369: note = Description of Artificial Sequence: Synthetic polynucleotide
  misc_feature 1..369: note = Anti-TREM2 Antibody Variable Region Nucleic Acid - HV Antibody ID V49 E02
  source 1..369: mol_type = other DNA
gaggtgcagctggtgcagtctggagcagaggtgaaaaagcccggggagtctctgaagatctcctgtaagggttctggatacagttttaatagctactggatcgcctgggtgcgccagatgcccgggaaaggcctggagtggatggggacgatctatcctggtgactctgataccagactgagcccgtccttccaaggccaggtcaccatctcagccgacaagtccatcagcaccgcctacctacagtggagcagcctgaaggcctcggacaccgccatgtatttctgtgcgagaagtaggacgttttattatgatagtagtgattattttgactactggggccagggaaccctggtcaccgtgtcctca

SEQ ID NO: 260 - DNA, 369 bp, synthetic construct
  misc_feature 1..369: note = Description of Artificial Sequence: Synthetic polynucleotide
  misc_feature 1..369: note = Anti-TREM2 Antibody Variable Region Nucleic Acid - HV Antibody ID V52 E05
  source 1..369: mol_type = other DNA
gaggtgcagctggtgcagtctggagcagaggtgaaaaagcccggggagtctctgaagatctcctgtaagggttctggatacagttttgagagctactggatcgcctgggtgcgccagatgcccgggaaaggcctggagtggatggggatcatctatcctggtgactctgataccagatacagcccgtccttccaaggccaggtcaccatctcagccgacaagtccatcagcaccgcctacctacagtggagcagcctgaaggcctcggacaccgccatgtatttctgtgcgagagggaggacgttttattatgatagtagtgattattttgactactggggccagggaaccctggtcaccgtgtcctca

SEQ ID NO: 261 - DNA, 369 bp, synthetic construct
  misc_feature 1..369: note = Description of Artificial Sequence: Synthetic polynucleotide
  misc_feature 1..369: note = Anti-TREM2 Antibody Variable Region Nucleic Acid - HV Antibody ID V60 F01
  source 1..369: mol_type = other DNA
gaggtgcagctggtgcagtctggagcagaggtgaaaaagcccggggagtctctgaagatctcctgtaagggttctggataccattttaccagctactggatcgcctgggtgcgccagatgcccgggaaaggcctggagtggatggggatcatctatcctggtgactctgatgtgagatacagcccgtccttccaaggccaggtcaccatctcagccgacaagtccatcagcaccgcctacctacagtggagcagcctgaaggcctcggacaccgccatgtatttctgtgcgagacaaaggacgttttattatgatagtagtgattatagtgactactggggccagggaaccctggtcaccgtgtcctca

SEQ ID NO: 262 - DNA, 369 bp, synthetic construct
  misc_feature 1..369: note = Description of Artificial Sequence: Synthetic polynucleotide
  misc_feature 1..369: note = Anti-TREM2 Antibody Variable Region Nucleic Acid - HV Antibody ID V73 G02
  source 1..369: mol_type = other DNA
gaggtgcagctggtgcagtctggagcagaggtgaaaaagcccggggagtctctgaagatctcctgtaagggttctggatacagttttggtagctactggatcgcctgggtgcgccagatgcccgggaaaggcctggagtggatggggatcatctatcctggtgactctgataccagatacagcccggggttccaaggccaggtcaccatctcagccgacaagtccatcagcaccgcctacctacagtggagcagcctgaaggcctcggacaccgccatgtatttctgtgcgagagggaggacgttttattatgatagtagtgattattttgactactggggccagggaaccctggtcaccgtgtcctca

SEQ ID NO: 263 - DNA, 369 bp, synthetic construct
  misc_feature 1..369: note = Description of Artificial Sequence: Synthetic polynucleotide
  misc_feature 1..369: note = Anti-TREM2 Antibody Variable Region Nucleic Acid - HV Antibody ID V76 G05
  source 1..369: mol_type = other DNA
gaggtgcagctggtgcagtctggagcagaggtgaaaaagcccggggagtctctgaagatctcctgtaagggttctggatacagttttgggagctactggatcgcctgggtgcgccagatgcccgggaaaggcctggagtggatggggatcatctatcctggtgactctgataccagatacagcccggagttccaaggccaggtcaccatctcagccgacaagtccatcagcaccgcctacctacagtggagcagcctgaaggcctcggacaccgccatgtatttctgtgcgagacaaaggacgttttattatgatagtagtgattatagtgactactggggccagggaaccctggtcaccgtgtcctca

SEQ ID NO: 264 - DNA, 369 bp, synthetic construct
  misc_feature 1..369: note = Description of Artificial Sequence: Synthetic polynucleotide
  misc_feature 1..369: note = Anti-TREM2 Antibody Variable Region Nucleic Acid - HV Antibody ID V84 H01
  source 1..369: mol_type = other DNA
gaggtgcagctggtgcagtctggagcagaggtgaaaaagcccggggagtctctgaagatctcctgtaagggttctggatacgggtttaccagctactggatcgcctgggtgcgccagatgcccgggaaaggcctggagtggatggggatcatctatcctggtgacagtgataccagatacagcccgtccttccaaggccaggtcaccatctcagccgacaagtccatcagcaccgcctacctacagtggagcagcctgaaggcctcggacaccgccatgtatttctgtgcgagacaaaggacgttttattatgatagtagtgattattcggactactggggccagggaaccctggtcaccgtgtcctca

SEQ ID NO: 265 - protein, 22 aa, synthetic construct
  REGION 1..22: note = Description of Artificial Sequence: Synthetic peptide
  REGION 1..22: note = Secretory peptide #1
MDMRVPAQLLGLLLLWLRGARC

SEQ ID NO: 266 - protein, 19 aa, synthetic construct
  REGION 1..19: note = Description of Artificial Sequence: Synthetic peptide
  REGION 1..19: note = Secretory peptide #2
MAWALLLLTLLTQGTGSWA

SEQ ID NO: 267 - skipped

SEQ ID NO: 268 - protein, 20 aa, synthetic construct
  REGION 1..20: note = Description of Artificial Sequence: Synthetic peptide
  REGION 1..20: note = Secretory peptide #4
MEAPAQLLFLLLLWLPDTTG

SEQ ID NO: 269 - protein, 19 aa, synthetic construct
  REGION 1..19: note = Description of Artificial Sequence: Synthetic peptide
  REGION 1..19: note = Secretory peptide #5
MEWTWRVLFLVAAATGAHS

SEQ ID NO: 270 - protein, 20 aa, synthetic construct
  REGION 1..20: note = Description of Artificial Sequence: Synthetic peptide
  REGION 1..20: note = Secretory peptide #6
METPAQLLFLLLLWLPDTTG

SEQ ID NO: 271 - protein, 9 aa, synthetic construct
  REGION 1..9: note = Description of Artificial Sequence: Synthetic peptide
  REGION 1..9: note = CDRL3 Antibody ID V83
QQAVSFPRT

SEQ ID NO: 272 - protein, 19 aa, synthetic construct
  REGION 1..19: note = Description of Artificial Sequence: Synthetic peptide
  REGION 1..19: note = Secretory peptide #8
MKHLWFFLLLVAAPRWVLS

SEQ ID NO: 273 - protein, 19 aa, synthetic construct
  REGION 1..19: note = Description of Artificial Sequence: Synthetic peptide
  REGION 1..19: note = Secretory peptide #9
MEWSWVFLFFLSVTTGVHS

SEQ ID NO: 274 - protein, 22 aa, synthetic construct
  REGION 1..22: note = Description of Artificial Sequence: Synthetic peptide
  REGION 1..22: note = Secretory peptide #10
MDIRAPTQLLGLLLLWLPGAKC

SEQ ID NO: 275 - protein, 22 aa, synthetic construct
  REGION 1..22: note = Description of Artificial Sequence: Synthetic peptide
  REGION 1..22: note = Secretory peptide #11
MDIRAPTQLLGLLLLWLPGARC

SEQ ID NO: 276 - protein, 22 aa, synthetic construct
  REGION 1..22: note = Description of Artificial Sequence: Synthetic peptide
  REGION 1..22: note = Secretory peptide #12
MDTRAPTQLLGLLLLWLPGATF

SEQ ID NO: 277 - protein, 22 aa, synthetic construct
  REGION 1..22: note = Description of Artificial Sequence: Synthetic peptide
  REGION 1..22: note = Secretory peptide #13
MDTRAPTQLLGLLLLWLPGARC

SEQ ID NO: 278 - protein, 19 aa, synthetic construct
  REGION 1..19: note = Description of Artificial Sequence: Synthetic peptide
  REGION 1..19: note = Secretory peptide #14
METGLRWLLLVAVLKGVQC

SEQ ID NO: 279 - protein, 21 aa, synthetic construct
  REGION 1..21: note = Description of Artificial Sequence: Synthetic peptide
  REGION 1..21: note = Secretory peptide #15
METGLRWLLLVAVLKGVQCQE

SEQ ID NO: 280 - protein, 22 aa, synthetic construct
  REGION 1..22: note = Description of Artificial Sequence: Synthetic peptide
  REGION 1..22: note = Secretory peptide #16
MDMRAPTQLLGLLLLWLPGARC

SEQ ID NO: 281 - protein, 217 aa, Homo sapiens
APELLGGPSVFLFPPKPKDTLMISRTPEVTCVVVDVSHEDPEVKFNWYVDGVEVHNAKTKPREEQYGSTYRVVSVLTVLHQDWLNGKEYKCKVSNKALPAPIEKTISKAKGQPREPQVYTLPPSREEMTKNQVSLTCLVKGFYPSDIAVEWESNGQPENNYKTTPPVLDSDGSFFLYSKLTVDKSRWQQGNVFSCSVMHEALHNHYTQKSLSLSPGK

SEQ ID NO: 282 - protein, 217 aa, Homo sapiens
APELLGGPSVFLFPPKPKDTLMISRTPEVTCVVVDVSHEDPEVKFNWYVDGVEVHNAKTKPCEEQYGSTYRCVSVLTVLHQDWLNGKEYKCKVSNKALPAPIEKTISKAKGQPREPQVYTLPPSREEMTKNQVSLTCLVKGFYPSDIAVEWESNGQPENNYKTTPPVLDSDGSFFLYSKLTVDKSRWQQGNVFSCSVMHEALHNHYTQKSLSLSPGK

SEQ ID NO: 283 - protein, 21 aa, synthetic construct
  REGION 1..21: note = Description of Artificial Sequence: Synthetic peptide
  REGION 1..21: note = MOG peptide 35-55
MEVGWYRSPFSRVVHLYRNGK

SEQ ID NO: 284 - protein, 11 aa, synthetic construct
  REGION 1..11: note = Description of Artificial Sequence: Synthetic peptide
  REGION 1..11: note = CDRL1 Consensus for 6E7 reduced Affinity variants
  VARIANT 1: note = R or A
  VARIANT 8: note = S or R
XASQGISXWLA

SEQ ID NO: 285 - protein, 7 aa, synthetic construct
  REGION 1..7: note = Description of Artificial Sequence: Synthetic peptide
  REGION 1..7: note = CDRL2 Consensus for 6E7 reduced Affinity variants
  VARIANT 1: note = A or S
  VARIANT 3: note = S or G
XAXSLQN

SEQ ID NO: 286 - protein, 9 aa, synthetic construct
  REGION 1..9: note = Description of Artificial Sequence: Synthetic peptide
  REGION 1..9: note = CDRL3 Consensus for 6E7 reduced Affinity variants
  VARIANT 4: note = D or V
  VARIANT 8: note = R or L
QQAXSFPXT

SEQ ID NO: 287 - protein, 5 aa, synthetic construct
  REGION 1..5: note = Description of Artificial Sequence: Synthetic peptide
  REGION 1..5: note = CDRH1 Consensus for 6E7 reduced Affinity variants
  VARIANT 2: note = Y or E
SXWIA

SEQ ID NO: 288 - protein, 17 aa, synthetic construct
  REGION 1..17: note = Description of Artificial Sequence: Synthetic peptide
  REGION 1..17: note = CDRH2 Consensus for 6E7 reduced Affinity variants
  VARIANT 5: note = G or S
IIYPXDSDTRYSPSFQG

SEQ ID NO: 289 - protein, 14 aa, synthetic construct
  REGION 1..14: note = Description of Artificial Sequence: Synthetic peptide
  REGION 1..14: note = CDRH3 Consensus for 6E7 reduced Affinity variants
  VARIANT 3: note = T or G
  VARIANT 5: note = Y or R
  VARIANT 6: note = Y or G
QRXFXXDSSDYFDY

SEQ ID NO: 290 - protein, 11 aa, synthetic construct
  REGION 1..11: note = Description of Artificial Sequence: Synthetic peptide
  REGION 1..11: note = CDRL1 Antibody ID V57 E10
AASQGISSWLA

SEQ ID NO: 291 - protein, 11 aa, synthetic construct
  REGION 1..11: note = Description of Artificial Sequence: Synthetic peptide
  REGION 1..11: note = CDRL1 Antibody ID V90 H07
RASQGISRWLA

SEQ ID NO: 292 - protein, 7 aa, synthetic construct
  REGION 1..7: note = Description of Artificial Sequence: Synthetic peptide
  REGION 1..7: note = CDRL2 Antibody ID V10 A11
SASSLQN

SEQ ID NO: 293 - protein, 7 aa, synthetic construct
  REGION 1..7: note = Description of Artificial Sequence: Synthetic peptide
  REGION 1..7: note = CDRL2 Antibody ID V70 F11
AAGSLQN

SEQ ID NO: 294 - protein, 9 aa, synthetic construct
  REGION 1..9: note = Description of Artificial Sequence: Synthetic peptide
  REGION 1..9: note = CDRL2 Antibody ID V23 B12
QQADSFPLT

SEQ ID NO: 295 - protein, 107 aa, synthetic construct
  REGION 1..107: note = Description of Artificial Sequence: Synthetic polypeptide
  REGION 1..107: note = VL Amino Acid Sequence Antibody ID V10 A11
DIQMTQSPSSVSASVGDRVTITCRASQGISSWLAWYQQKPGKAPKLLIYSASSLQNGVPSRFSGSGSGTDFTLTISSLQPEDFATYFCQQADSFPRTFGQGTKLEIK

SEQ ID NO: 296 - protein, 107 aa, synthetic construct
  REGION 1..107: note = Description of Artificial Sequence: Synthetic polypeptide
  REGION 1..107: note = VL Amino Acid Sequence Antibody ID V23 B12
DIQMTQSPSSVSASVGDRVTITCRASQGISSWLAWYQQKPGKAPKLLIYAASSLQNGVPSRFSGSGSGTDFTLTISSLQPEDFATYFCQQADSFPLTFGQGTKLEIK

SEQ ID NO: 297 - protein, 107 aa, synthetic construct
  REGION 1..107: note = Description of Artificial Sequence: Synthetic polypeptide
  REGION 1..107: note = VL Amino Acid Sequence Antibody ID V57 E10
DIQMTQSPSSVSASVGDRVTITCAASQGISSWLAWYQQKPGKAPKLLIYAASSLQNGVPSRFSGSGSGTDFTLTISSLQPEDFATYFCQQADSFPRTFGQGTKLEIK

SEQ ID NO: 298 - protein, 107 aa, synthetic construct
  REGION 1..107: note = Description of Artificial Sequence: Synthetic polypeptide
  REGION 1..107: note = VL Amino Acid Sequence Antibody ID V70 F11
DIQMTQSPSSVSASVGDRVTITCRASQGISSWLAWYQQKPGKAPKLLIYAAGSLQNGVPSRFSGSGSGTDFTLTISSLQPEDFATYFCQQADSFPRTFGQGTKLEIK

SEQ ID NO: 299 - protein, 107 aa, synthetic construct
  REGION 1..107: note = Description of Artificial Sequence: Synthetic polypeptide
  REGION 1..107: note = VL Amino Acid Sequence Antibody ID V83 G12
DIQMTQSPSSVSASVGDRVTITCRASQGISSWLAWYQQKPGKAPKLLIYAASSLQNGVPSRFSGSGSGTDFTLTISSLQPEDFATYFCQQAVSFPRTFGQGTKLEIK

SEQ ID NO: 300 - protein, 107 aa, synthetic construct
  REGION 1..107: note = Description of Artificial Sequence: Synthetic polypeptide
  REGION 1..107: note = VL Amino Acid Sequence Antibody ID V90 H07
DIQMTQSPSSVSASVGDRVTITCRASQGISRWLAWYQQKPGKAPKLLIYAASSLQNGVPSRFSGSGSGTDFTLTISSLQPEDFATYFCQQADSFPRTFGQGTKLEIK

SEQ ID NO: 301 - protein, 4 aa, synthetic construct
  REGION 1..4: note = Description of Artificial Sequence: Synthetic peptide
  REGION 1..4: note = FR1/ CDRH1 border Antibody ID V30 C07
SSFT

SEQ ID NO: 302 - protein, 5 aa, synthetic construct
  REGION 1..5: note = Description of Artificial Sequence: Synthetic peptide
  REGION 1..5: note = CDRH1 Antibody ID V90 H07
SEWIA

SEQ ID NO: 303 - protein, 17 aa, synthetic construct
  REGION 1..17: note = Description of Artificial Sequence: Synthetic peptide
  REGION 1..17: note = CDRH2 Antibody ID V44 D09
IIYPSDSDTRYSPSFQG

SEQ ID NO: 304 - protein, 14 aa, synthetic construct
  REGION 1..14: note = Description of Artificial Sequence: Synthetic peptide
  REGION 1..14: note = CDRH3 Antibody ID V9 A10
QRGFYYDSSDYFDY

SEQ ID NO: 305 - protein, 14 aa, synthetic construct
  REGION 1..14: note = Description of Artificial Sequence: Synthetic peptide
  REGION 1..14: note = CDRH3 Antibody ID V33 C10
QRTFYGDSSDYFDY

SEQ ID NO: 306 - protein, 14 aa, synthetic construct
  REGION 1..14: note = Description of Artificial Sequence: Synthetic peptide
  REGION 1..14: note = CDRH3 Antibody ID V68 F09
QRTFRYDSSDYFDY

SEQ ID NO: 307 - protein, 123 aa, synthetic construct
  REGION 1..123: note = Description of Artificial Sequence: Synthetic polypeptide
  REGION 1..123: note = VH Amino Acid Sequence Antibody ID V9 A10
EVQLVQSGAEVKKPGESLKISCKGSGYSFTSYWIAWVRQMPGKGLEWMGIIYPGDSDTRYSPSFQGQVTISADKSISTAYLQWSSLKASDTAMYFCARQRGFYYDSSDYFDYWGQGTLVTVSS

SEQ ID NO: 308 - protein, 123 aa, synthetic construct
  REGION 1..123: note = Description of Artificial Sequence: Synthetic polypeptide
  REGION 1..123: note = VH Amino Acid Sequence Antibody ID V30 C07
EVQLVQSGAEVKKPGESLKISCKGSGSSFTSYWIAWVRQMPGKGLEWMGIIYPGDSDTRYSPSFQGQVTISADKSISTAYLQWSSLKASDTAMYFCARQRTFYYDSSDYFDYWGQGTLVTVSS

SEQ ID NO: 309 - protein, 123 aa, synthetic construct
  REGION 1..123: note = Description of Artificial Sequence: Synthetic polypeptide
  REGION 1..123: note = VH Amino Acid Sequence Antibody ID V33 C10
EVQLVQSGAEVKKPGESLKISCKGSGYSFTSYWIAWVRQMPGKGLEWMGIIYPGDSDTRYSPSFQGQVTISADKSISTAYLQWSSLKASDTAMYFCARQRTFYGDSSDYFDYWGQGTLVTVSS

SEQ ID NO: 310 - protein, 123 aa, synthetic construct
  REGION 1..123: note = Description of Artificial Sequence: Synthetic polypeptide
  REGION 1..123: note = VH Amino Acid Sequence Antibody ID V44 D09
EVQLVQSGAEVKKPGESLKISCKGSGYSFTSYWIAWVRQMPGKGLEWMGIIYPSDSDTRYSPSFQGQVTISADKSISTAYLQWSSLKASDTAMYFCARQRTFYYDSSDYFDYWGQGTLVTVSS

SEQ ID NO: 311 - protein, 123 aa, synthetic construct
  REGION 1..123: note = Description of Artificial Sequence: Synthetic polypeptide
  REGION 1..123: note = VH Amino Acid Sequence Antibody ID V68 F09
EVQLVQSGAEVKKPGESLKISCKGSGYSFTSYWIAWVRQMPGKGLEWMGIIYPGDSDTRYSPSFQGQVTISADKSISTAYLQWSSLKASDTAMYFCARQRTFRYDSSDYFDYWGQGTLVTVSS

SEQ ID NO: 312 - protein, 123 aa, synthetic construct
  REGION 1..123: note = Description of Artificial Sequence: Synthetic polypeptide
  REGION 1..123: note = VH Amino Acid Sequence Antibody ID V90 H07
EVQLVQSGAEVKKPGESLKISCKGSGYSFTSEWIAWVRQMPGKGLEWMGIIYPGDSDTRYSPSFQGQVTISADKSISTAYLQWSSLKASDTAMYFCARQRTFYYDSSDYFDYWGQGTLVTVSS

SEQ ID NO: 313 - DNA, 321 bp, synthetic construct
  misc_feature 1..321: note = Description of Artificial Sequence: Synthetic polynucleotide
  misc_feature 1..321: note = Anti-TREM2 Antibody Variable Region Nucleic Acid - LV Antibody ID V10 A11
  source 1..321: mol_type = other DNA
gacatccagatgacccagtctccatcttccgtgtctgcatctgtaggagacagagtcaccatcacttgtcgggcgagtcagggtattagcagctggttagcctggtatcagcagaaaccagggaaagcccctaagctcctgatctattctgcatccagtttgcaaaatggggtcccatcaaggttcagcggcagtggatctgggacagatttcactctcaccatcagcagcctgcagcctgaagattttgcaacttacttttgtcaacaggctgacagtttccctcgcacttttggccaggggaccaagctggagatcaaa

SEQ ID NO: 314 - DNA, 321 bp, synthetic construct
  misc_feature 1..321: note = Description of Artificial Sequence: Synthetic polynucleotide
  misc_feature 1..321: note = Anti-TREM2 Antibody Variable Region Nucleic Acid - LV Antibody ID V23 B12
  source 1..321: mol_type = other DNA
gacatccagatgacccagtctccatcttccgtgtctgcatctgtaggagacagagtcaccatcacttgtcgggcgagtcagggtattagcagctggttagcctggtatcagcagaaaccagggaaagcccctaagctcctgatctatgctgcatccagtttgcaaaatggggtcccatcaaggttcagcggcagtggatctgggacagatttcactctcaccatcagcagcctgcagcctgaagattttgcaacttacttttgtcaacaggctgacagtttccctcttacttttggccaggggaccaagctggagatcaaa

SEQ ID NO: 315 - DNA, 321 bp, synthetic construct
  misc_feature 1..321: note = Description of Artificial Sequence: Synthetic polynucleotide
  misc_feature 1..321: note = Anti-TREM2 Antibody Variable Region Nucleic Acid - LV Antibody ID V57 E10
  source 1..321: mol_type = other DNA
gacatccagatgacccagtctccatcttccgtgtctgcatctgtaggagacagagtcaccatcacttgtgcggcgagtcagggtattagcagctggttagcctggtatcagcagaaaccagggaaagcccctaagctcctgatctatgctgcatccagtttgcaaaatggggtcccatcaaggttcagcggcagtggatctgggacagatttcactctcaccatcagcagcctgcagcctgaagattttgcaacttacttttgtcaacaggctgacagtttccctcgcacttttggccaggggaccaagctggagatcaaa

SEQ ID NO: 316 - DNA, 321 bp, synthetic construct
  misc_feature 1..321: note = Description of Artificial Sequence: Synthetic polynucleotide
  misc_feature 1..321: note = Anti-TREM2 Antibody Variable Region Nucleic Acid - LV Antibody ID V70 F11
  source 1..321: mol_type = other DNA
gacatccagatgacccagtctccatcttccgtgtctgcatctgtaggagacagagtcaccatcacttgtcgggcgagtcagggtattagcagctggttagcctggtatcagcagaaaccagggaaagcccctaagctcctgatctatgctgcagggagtttgcaaaatggggtcccatcaaggttcagcggcagtggatctgggacagatttcactctcaccatcagcagcctgcagcctgaagattttgcaacttacttttgtcaacaggctgacagtttccctcgcacttttggccaggggaccaagctggagatcaaa

SEQ ID NO: 317 - DNA, 321 bp, synthetic construct
  misc_feature 1..321: note = Description of Artificial Sequence: Synthetic polynucleotide
  misc_feature 1..321: note = Anti-TREM2 Antibody Variable Region Nucleic Acid - LV Antibody ID V83
  source 1..321: mol_type = other DNA
gacatccagatgacccagtctccatcttccgtgtctgcatctgtaggagacagagtcaccatcacttgtcgggcgagtcagggtattagcagctggttagcctggtatcagcagaaaccagggaaagcccctaagctcctgatctatgctgcatccagtttgcaaaatggggtcccatcaaggttcagcggcagtggatctgggacagatttcactctcaccatcagcagcctgcagcctgaagattttgcaacttacttttgtcaacaggctgtgagtttccctcgcacttttggccaggggaccaagctggagatcaaa

SEQ ID NO: 318 - DNA, 321 bp, synthetic construct
  misc_feature 1..321: note = Description of Artificial Sequence: Synthetic polynucleotide
  misc_feature 1..321: note = Anti-TREM2 Antibody Variable Region Nucleic Acid - LV Antibody ID V90 H07
  source 1..321: mol_type = other DNA
gacatccagatgacccagtctccatcttccgtgtctgcatctgtaggagacagagtcaccatcacttgtcgggcgagtcagggtattagcagatggttagcctggtatcagcagaaaccagggaaagcccctaagctcctgatctatgctgcatccagtttgcaaaatggggtcccatcaaggttcagcggcagtggatctgggacagatttcactctcaccatcagcagcctgcagcctgaagattttgcaacttacttttgtcaacaggctgacagtttccctcgcacttttggccaggggaccaagctggagatcaaa

SEQ ID NO: 319 - DNA, 369 bp, synthetic construct
  misc_feature 1..369: note = Description of Artificial Sequence: Synthetic polynucleotide
  misc_feature 1..369: note = Anti-TREM2 Antibody Variable Region Nucleic Acid - HV Antibody ID V9 A10
  source 1..369: mol_type = other DNA
gaggtgcagctggtgcagtctggagcagaggtgaaaaagcccggggagtctctgaagatctcctgtaagggttctggatacagttttaccagctactggatcgcctgggtgcgccagatgcccgggaaaggcctggagtggatggggatcatctatcctggtgactctgataccagatacagcccgtccttccaaggccaggtcaccatctcagccgacaagtccatcagcaccgcctacctacagtggagcagcctgaaggcctcggacaccgccatgtatttctgtgcgagacaaagggggttttattatgatagtagtgattattttgactactggggccagggaaccctggtcaccgtgtcctca

SEQ ID NO: 320 - DNA, 369 bp, synthetic construct
  misc_feature 1..369: note = Description of Artificial Sequence: Synthetic polynucleotide
  misc_feature 1..369: note = Anti-TREM2 Antibody Variable Region Nucleic Acid - HV Antibody ID V10 A11 V23 B12 V57 E10 V70 F11 V83 G12
  source 1..369: mol_type = other DNA
gaggtgcagctggtgcagtctggagcagaggtgaaaaagcccggggagtctctgaagatctcctgtaagggttctggatacagttttaccagctactggatcgcctgggtgcgccagatgcccgggaaaggcctggagtggatggggatcatctatcctggtgactctgataccagatacagcccgtccttccaaggccaggtcaccatctcagccgacaagtccatcagcaccgcctacctacagtggagcagcctgaaggcctcggacaccgccatgtatttctgtgcgagacaaaggacgttttattatgatagtagtgattattttgactactggggccagggaaccctggtcaccgtgtcctca

SEQ ID NO: 321 - DNA, 369 bp, synthetic construct
  misc_feature 1..369: note = Description of Artificial Sequence: Synthetic polynucleotide
  misc_feature 1..369: note = Anti-TREM2 Antibody Variable Region Nucleic Acid - HV Antibody ID V30 C07
  source 1..369: mol_type = other DNA
gaggtgcagctggtgcagtctggagcagaggtgaaaaagcccggggagtctctgaagatctcctgtaagggttctggatcgagttttaccagctactggatcgcctgggtgcgccagatgcccgggaaaggcctggagtggatggggatcatctatcctggtgactctgataccagatacagcccgtccttccaaggccaggtcaccatctcagccgacaagtccatcagcaccgcctacctacagtggagcagcctgaaggcctcggacaccgccatgtatttctgtgcgagacaaaggacgttttattatgatagtagtgattattttgactactggggccagggaaccctggtcaccgtgtcctca

SEQ ID NO: 322 - DNA, 369 bp, synthetic construct
  misc_feature 1..369: note = Description of Artificial Sequence: Synthetic polynucleotide
  misc_feature 1..369: note = Anti-TREM2 Antibody Variable Region Nucleic Acid - HV Antibody ID V33 C10
  source 1..369: mol_type = other DNA
gaggtgcagctggtgcagtctggagcagaggtgaaaaagcccggggagtctctgaagatctcctgtaagggttctggatacagttttaccagctactggatcgcctgggtgcgccagatgcccgggaaaggcctggagtggatggggatcatctatcctggtgactctgataccagatacagcccgtccttccaaggccaggtcaccatctcagccgacaagtccatcagcaccgcctacctacagtggagcagcctgaaggcctcggacaccgccatgtatttctgtgcgagacaaaggacgttttatggggatagtagtgattattttgactactggggccagggaaccctggtcaccgtgtcctca

SEQ ID NO: 323 - DNA, 369 bp, synthetic construct
  misc_feature 1..369: note = Description of Artificial Sequence: Synthetic polynucleotide
  misc_feature 1..369: note = Anti-TREM2 Antibody Variable Region Nucleic Acid - HV Antibody ID V44 D09
  source 1..369: mol_type = other DNA
gaggtgcagctggtgcagtctggagcagaggtgaaaaagcccggggagtctctgaagatctcctgtaagggttctggatacagttttaccagctactggatcgcctgggtgcgccagatgcccgggaaaggcctggagtggatggggatcatctatcctagtgactctgataccagatacagcccgtccttccaaggccaggtcaccatctcagccgacaagtccatcagcaccgcctacctacagtggagcagcctgaaggcctcggacaccgccatgtatttctgtgcgagacaaaggacgttttattatgatagtagtgattattttgactactggggccagggaaccctggtcaccgtgtcctca

SEQ ID NO: 324 - DNA, 369 bp, synthetic construct
  misc_feature 1..369: note = Description of Artificial Sequence: Synthetic polynucleotide
  misc_feature 1..369: note = Anti-TREM2 Antibody Variable Region Nucleic Acid - HV Antibody ID V68 F09
  source 1..369: mol_type = other DNA
gaggtgcagctggtgcagtctggagcagaggtgaaaaagcccggggagtctctgaagatctcctgtaagggttctggatacagttttaccagctactggatcgcctgggtgcgccagatgcccgggaaaggcctggagtggatggggatcatctatcctggtgactctgataccagatacagcccgtccttccaaggccaggtcaccatctcagccgacaagtccatcagcaccgcctacctacagtggagcagcctgaaggcctcggacaccgccatgtatttctgtgcgagacaaaggacgtttaggtatgatagtagtgattattttgactactggggccagggaaccctggtcaccgtgtcctca

SEQ ID NO: 325 - DNA, 369 bp, synthetic construct
  misc_feature 1..369: note = Description of Artificial Sequence: Synthetic polynucleotide
  misc_feature 1..369: note = Anti-TREM2 Antibody Variable Region Nucleic Acid - HV Antibody ID V90 H07
  source 1..369: mol_type = other DNA
gaggtgcagctggtgcagtctggagcagaggtgaaaaagcccggggagtctctgaagatctcctgtaagggttctggatacagttttaccagcgagtggatcgcctgggtgcgccagatgcccgggaaaggcctggagtggatggggatcatctatcctggtgactctgataccagatacagcccgtccttccaaggccaggtcaccatctcagccgacaagtccatcagcaccgcctacctacagtggagcagcctgaaggcctcggacaccgccatgtatttctgtgcgagacaaaggacgttttattatgatagtagtgattattttgactactggggccagggaaccctggtcaccgtgtcctca

SEQ ID NO: 326 - protein, 113 aa, synthetic construct
  REGION 1..113: note = Description of Artificial Sequence: Synthetic polypeptide
  REGION 1..113: note = LC variable region sequence 24G6
DIVMTQSPDSLAVSLGERATINCKSSQSVLYSSNNKHFLAWYQQKPGQPPKLLIYWASTRESGVPDRFSGSGSGTDFTLTISSLQAEDVAVYYCQQYYSTPLTFGGGTKVEIK

SEQ ID NO: 327 - protein, 119 aa, synthetic construct
  REGION 1..119: note = Description of Artificial Sequence: Synthetic polypeptide
  REGION 1..119: note = HC variable region sequence 24G6
EVQLLESGGGLVQPGGSLRLSCAASGFTFSSYAMSWVRQAPGKGLEWVSAISGSGGSTYYAESVKGRFTISRDNSKNTLYLQMNSLRAEDTAVYYCAKAYTPMAFFDYWGQGTLVTVSS

SEQ ID NO: 328 - protein, 107 aa, synthetic construct
  REGION 1..107: note = Description of Artificial Sequence: Synthetic polypeptide
  REGION 1..107: note = LC variable region sequence 6E7
DIQMTQSPSSVSASVGDRVTITCRASQGISSWLAWYQQKPGKAPKLLIYAASSLQSGVPSRFSGSGSGTDFTLTISSLQPEDFATYFCQQADAFPRTFGQGTKLEIK

SEQ ID NO: 329 - protein, 123 aa, synthetic construct
  REGION 1..123: note = Description of Artificial Sequence: Synthetic polypeptide
  REGION 1..123: note = HC variable region sequence 6E7
EVQLVQSGAEVKKPGESLKISCKGSGYSFTSYWIAWVRQMPGKGLEWMGIIYPGDADARYSPSFQGQVTISADKSISTAYLQWSSLKASDTAMYFCARQRTFYYDSSDYFDYWGQGTLVTVSS

SEQ ID NO: 330 - protein, 107 aa, synthetic construct
  REGION 1..107: note = Description of Artificial Sequence: Synthetic polypeptide
  REGION 1..107: note = LC variable region sequence 13E7
EIVMTQSPATLSVSPGERATLSCRASQSVSSNLAWFQQKPGQAPRLLIYGASTRATGIPARFSGSGSGTEFTLTISSLQPEDFAVYYCLQDNNFPPTFGQGTKVDIK

SEQ ID NO: 331 - protein, 121 aa, synthetic construct
  REGION 1..121: note = Description of Artificial Sequence: Synthetic polypeptide
  REGION 1..121: note = HC variable region sequence 13E7
EVQLVQSGAEVKKPGESLKISCKGSGYSFTSYWIGWVRQMPGKGLEWMGIIYPGDADARYSPSFQGQVTISADKSISTAYLQWSSLKASDTAMYFCARRRQGIFGDALDFWGQGTLVTVSS

SEQ ID NO: 332 - protein, 107 aa, synthetic construct
  REGION 1..107: note = Description of Artificial Sequence: Synthetic polypeptide
  REGION 1..107: note = LC variable region sequence 5E3
DIQMTQSPSSLSASVGDRVTITCRASQGISNYLAWYQQKPGKAPKSLIYAASSLQSGVPSRFSGSGSGTDFTLTISSLQPEDFATYYCQQYSTYPFTFGQGTKVDIK

SEQ ID NO: 333 - protein, 121 aa, synthetic construct
  REGION 1..121: note = Description of Artificial Sequence: Synthetic polypeptide
  REGION 1..121: note = HC variable region sequence 5E3
QVQLVQSGAEVKKPGASVKVSCKASGYTFTGYYIHWVRQAPGQGLEWMGWINPYSGGTTSAQKFQGRVTMTRDTSTSSAYMELSRLRSDDTAVYYCARDAGYLALYGTDVWGQGTLVTVSS

SEQ ID NO: 334 - protein, 242 aa, synthetic construct
  REGION 1..242: note = Description of Artificial Sequence: Synthetic polypeptide
  REGION 1..242: note = AA sequence LC SST28347
MDMRVPAQLLGLLLLWLRGARCDIVMTQSPDSLAVSLGERATINCKSSQSVLYSSNNKHFLAWYQQKPGQPPKLLIYWASTRESGVPDRFSGSGSGTDFTLTISSLQAEDVAVYYCQQYYSTPLTFGGGTKVEIKRTVAAPSVFIFPPSDEQLKSGTASVVCLLNNFYPREAKVQWKVDNALQSGNSQESVTEQDSKDSTYSLSSTLTLSKADYEKHKVYACEVTHQGLSSPVTKSFNRGEC

SEQ ID NO: 335 - protein, 471 aa, synthetic construct
  REGION 1..471: note = Description of Artificial Sequence: Synthetic polypeptide
  REGION 1..471: note = AA sequence HC SST28347
MDMRVPAQLLGLLLLWLRGARCEVQLLESGGGLVQPGGSLRLSCAASGFTFSSYAMSWVRQAPGKGLEWVSAISGSGGSTYYAESVKGRFTISRDNSKNTLYLQMNSLRAEDTAVYYCAKAYTPMAFFDYWGQGTLVTVSSASTKGPSVFPLAPSSKSTSGGTAALGCLVKDYFPEPVTVSWNSGALTSGVHTFPAVLQSSGLYSLSSVVTVPSSSLGTQTYICNVNHKPSNTKVDKKVEPKSCDKTHTCPPCPAPELLGGPSVFLFPPKPKDTLMISRTPEVTCVVVDVSHEDPEVKFNWYVDGVEVHNAKTKPCEEQYGSTYRCVSVLTVLHQDWLNGKEYKCKVSNKALPAPIEKTISKAKGQPREPQVYTLPPSREEMTKNQVSLTCLVKGFYPSDIAVEWESNGQPENNYKTTPPVLDSDGSFFLYSKLTVDKSRWQQGNVFSCSVMHEALHNHYTQKSLSLSPGK

SEQ ID NO: 336 - protein, 468 aa, synthetic construct
  REGION 1..468: note = Description of Artificial Sequence: Synthetic polypeptide
  REGION 1..468: note = AA sequence HC SST204812
MDMRVPAQLLGLLLLWLRGARCEVQLLESGGGLVQPGGSLRLSCAASGFTFSSYAMSWVRQAPGKGLEWVSAISGSGGSTYYAESVKGRFTISRDNSKNTLYLQMNSLRAEDTAVYYCAKAYTPMAFFDYWGQGTLVTVSSASTKGPSVFPLAPSSRSTSESTAALGCLVKDYFPEPVTVSWNSGALTSGVHTFPAVLQSSGLYSLSSVVTVPSSNFGTQTYTCNVDHKPSNTKVDKTVERKCCVECPPCPAPELLGGPSVFLFPPKPKDTLMISRTPEVTCVVVDVSHEDPEVKFNWYVDGVEVHNAKTKPCEEQYGSTYRCVSVLTVLHQDWLNGKEYKCKVSNKALPAPIEKTISKAKGQPREPQVYTLPPSREEMTKNQVSLTCLVKGFYPSDIAVEWESNGQPENNYKTTPPVLDSDGSFFLYSKLTVDKSRWQQGNVFSCSVMHEALHNHYTQKSLSLSPGK

SEQ ID NO: 337 - protein, 236 aa, synthetic construct
  REGION 1..236: note = Description of Artificial Sequence: Synthetic polypeptide
  REGION 1..236: note = AA sequence SST29857
MDMRVPAQLLGLLLLWLRGARCDIQMTQSPSSVSASVGDRVTITCRASQGISSWLAWYQQKPGKAPKLLIYAASSLQSGVPSRFSGSGSGTDFTLTISSLQPEDFATYFCQQADAFPRTFGQGTKLEIKRTVAAPSVFIFPPSDEQLKSGTASVVCLLNNFYPREAKVQWKVDNALQSGNSQESVTEQDSKDSTYSLSSTLTLSKADYEKHKVYACEVTHQGLSSPVTKSFNRGEC

SEQ ID NO: 338 - protein, 472 aa, synthetic construct
  REGION 1..472: note = Description of Artificial Sequence: Synthetic polypeptide
  REGION 1..472: note = AA sequence LC SST29857
MDMRVPAQLLGLLLLWLRGARCEVQLVQSGAEVKKPGESLKISCKGSGYSFTSYWIAWVRQMPGKGLEWMGIIYPGDADARYSPSFQGQVTISADKSISTAYLQWSSLKASDTAMYFCARQRTFYYDSSDYFDYWGQGTLVTVSSASTKGPSVFPLAPSSRSTSESTAALGCLVKDYFPEPVTVSWNSGALTSGVHTFPAVLQSSGLYSLSSVVTVPSSNFGTQTYTCNVDHKPSNTKVDKTVERKCCVECPPCPAPELLGGPSVFLFPPKPKDTLMISRTPEVTCVVVDVSHEDPEVKFNWYVDGVEVHNAKTKPCEEQYGSTYRCVSVLTVLHQDWLNGKEYKCKVSNKALPAPIEKTISKAKGQPREPQVYTLPPSREEMTKNQVSLTCLVKGFYPSDIAVEWESNGQPENNYKTTPPVLDSDGSFFLYSKLTVDKSRWQQGNVFSCSVMHEALHNHYTQKSLSLSPGK

SEQ ID NO: 339 - protein, 236 aa, synthetic construct
  REGION 1..236: note = Description of Artificial Sequence: Synthetic polypeptide
  REGION 1..236: note = AA sequence LC SST202443
MDMRVPAQLLGLLLLWLRGARCEIVMTQSPATLSVSPGERATLSCRASQSVSSNLAWFQQKPGQAPRLLIYGASTRATGIPARFSGSGSGTEFTLTISSLQPEDFAVYYCLQDNNFPPTFGQGTKVDIKRTVAAPSVFIFPPSDEQLKSGTASVVCLLNNFYPREAKVQWKVDNALQSGNSQESVTEQDSKDSTYSLSSTLTLSKADYEKHKVYACEVTHQGLSSPVTKSFNRGEC

SEQ ID NO: 340 - protein, 473 aa, synthetic construct
  REGION 1..473: note = Description of Artificial Sequence: Synthetic polypeptide
  REGION 1..473: note = AA sequence HC SST202443
MDMRVPAQLLGLLLLWLRGARCEVQLVQSGAEVKKPGESLKISCKGSGYSFTSYWIGWVRQMPGKGLEWMGIIYPGDADARYSPSFQGQVTISADKSISTAYLQWSSLKASDTAMYFCARRRQGIFGDALDFWGQGTLVTVSSASTKGPSVFPLAPSSKSTSGGTAALGCLVKDYFPEPVTVSWNSGALTSGVHTFPAVLQSSGLYSLSSVVTVPSSSLGTQTYICNVNHKPSNTKVDKKVEPKSCDKTHTCPPCPAPELLGGPSVFLFPPKPKDTLMISRTPEVTCVVVDVSHEDPEVKFNWYVDGVEVHNAKTKPCEEQYGSTYRCVSVLTVLHQDWLNGKEYKCKVSNKALPAPIEKTISKAKGQPREPQVYTLPPSREEMTKNQVSLTCLVKGFYPSDIAVEWESNGQPENNYKTTPPVLDSDGSFFLYSKLTVDKSRWQQGNVFSCSVMHEALHNHYTQKSLSLSPGK

SEQ ID NO: 341 - protein, 236 aa, synthetic construct
  REGION 1..236: note = Description of Artificial Sequence: Synthetic polypeptide
  REGION 1..236: note = AA sequence LC SST29825
MDMRVPAQLLGLLLLWLRGARCDIQMTQSPSSLSASVGDRVTITCRASQGISNYLAWYQQKPGKAPKSLIYAASSLQSGVPSRFSGSGSGTDFTLTISSLQPEDFATYYCQQYSTYPFTFGQGTKVDIKRTVAAPSVFIFPPSDEQLKSGTASVVCLLNNFYPREAKVQWKVDNALQSGNSQESVTEQDSKDSTYSLSSTLTLSKADYEKHKVYACEVTHQGLSSPVTKSFNRGEC

SEQ ID NO: 342 - protein, 470 aa, synthetic construct
  REGION 1..470: note = Description of Artificial Sequence: Synthetic polypeptide
  REGION 1..470: note = AA sequence HC SST29825
MDMRVPAQLLGLLLLWLRGARCQVQLVQSGAEVKKPGASVKVSCKASGYTFTGYYIHWVRQAPGQGLEWMGWINPYSGGTTSAQKFQGRVTMTRDTSTSSAYMELSRLRSDDTAVYYCARDAGYLALYGTDVWGQGTLVTVSSASTKGPSVFPLAPSSRSTSESTAALGCLVKDYFPEPVTVSWNSGALTSGVHTFPAVLQSSGLYSLSSVVTVPSSNFGTQTYTCNVDHKPSNTKVDKTVERKCCVECPPCPAPELLGGPSVFLFPPKPKDTLMISRTPEVTCVVVDVSHEDPEVKFNWYVDGVEVHNAKTKPCEEQYGSTYRCVSVLTVLHQDWLNGKEYKCKVSNKALPAPIEKTISKAKGQPREPQVYTLPPSREEMTKNQVSLTCLVKGFYPSDIAVEWESNGQPENNYKTTPPVLDSDGSFFLYSKLTVDKSRWQQGNVFSCSVMHEALHNHYTQKSLSLSPGK

SEQ ID NO: 343 - DNA, 339 bp, synthetic construct
  misc_feature 1..339: note = Description of Artificial Sequence: Synthetic polynucleotide
  misc_feature 1..339: note = LC variable region sequence SST28347 and SST204812
  source 1..339: mol_type = other DNA
gacatcgtgatgacccagtctccagactccctggctgtgtctctgggcgagagggccaccatcaactgcaagtccagccagagtgttttatacagctccaacaataagcacttcttagcttggtaccagcagaaaccaggacagcctcctaagctgctcatttactgggcatctacccgggagtccggggtccctgaccgattcagtggcagcgggtctgggacagatttcactctcaccatcagcagcctgcaggctgaagatgtggcagtttattactgtcagcaatattatagtactccgctcactttcggcggagggaccaaggtggagatcaaa

SEQ ID NO: 344 - DNA, 357 bp, synthetic construct
  misc_feature 1..357: note = Description of Artificial Sequence: Synthetic polynucleotide
  misc_feature 1..357: note = HC variable region sequence SST28347 and SST204812
  source 1..357: mol_type = other DNA
gaggtgcagctgttggagtctgggggaggcttggtacagcctggggggtccctgagactctcctgtgcagcctctggattcacctttagcagctatgccatgagctgggtccgccaggctccagggaagggactggagtgggtctcagctattagtggtagtggtggtagcacatactacgcagaatccgtgaagggccggttcaccatctccagagacaattccaagaacacgctgtatctgcaaatgaacagcctgagagccgaggacacggccgtatattactgtgcgaaggcgtatacacctatggcattctttgactactggggccagggaaccctggtcaccgtctcctca

SEQ ID NO: 345 - DNA, 321 bp, synthetic construct
  misc_feature 1..321: note = Description of Artificial Sequence: Synthetic polynucleotide
  misc_feature 1..321: note = LC variable region sequence SST29857
  source 1..321: mol_type = other DNA
gacatccagatgacccagtctccatcttccgtgtctgcatctgtaggagacagagtcaccatcacttgtcgggcgagtcagggtattagcagctggttagcctggtatcagcagaaaccagggaaagcccctaagctcctgatctatgctgcatccagtttgcaaagtggggtcccatcaaggttcagcggcagtggatctgggacagatttcactctcaccatcagcagcctgcagcctgaagattttgcaacttacttttgtcaacaggctgacgctttccctcgcacttttggccaggggaccaagctggagatcaaa

SEQ ID NO: 346 - DNA, 369 bp, synthetic construct
  misc_feature 1..369: note = Description of Artificial Sequence: Synthetic polynucleotide
  misc_feature 1..369: note = HC variable region sequence SST29857
  source 1..369: mol_type = other DNA
gaggtgcagctggtgcagtctggagcagaggtgaaaaagcccggggagtctctgaagatctcctgtaagggttctggatacagttttaccagctactggatcgcctgggtgcgccagatgcccgggaaaggcctggagtggatggggatcatctatcctggtgacgctgatgccagatacagcccgtccttccaaggccaggtcaccatctcagccgacaagtccatcagcaccgcctacctacagtggagcagcctgaaggcctcggacaccgccatgtatttctgtgcgagacaaaggacgttttattatgatagtagtgattattttgactactggggccagggaaccctggtcaccgtgtcctca

SEQ ID NO: 347 - DNA, 321 bp, synthetic construct
  misc_feature 1..321: note = Description of Artificial Sequence: Synthetic polynucleotide
  misc_feature 1..321: note = LC variable region sequence SST202443
  source 1..321: mol_type = other DNA
gaaatagtgatgacgcagtctccagccaccctgtctgtgtctccaggggaaagagccaccctctcctgcagggccagtcagagtgttagcagcaacttagcctggttccagcagaaacctggccaggctcccaggctcctcatctatggtgcttccaccagggccactggtattccagccaggttcagtggcagtgggtctgggacagagttcactctcaccatcagcagcctgcagcctgaagattttgcagtttattactgtctgcaggataataatttccctcccactttcggccaagggaccaaagtggatatcaaa

SEQ ID NO: 348 - DNA, 363 bp, synthetic construct
  misc_feature 1..363: note = Description of Artificial Sequence: Synthetic polynucleotide
  misc_feature 1..363: note = HC variable region sequence SST202443
  source 1..363: mol_type = other DNA
gaggtgcagctggtgcagtctggagcagaggtgaaaaagcccggggagtctctgaagatctcctgtaagggttctggatacagctttaccagctactggatcggctgggtgcgccagatgcccgggaaaggcctggagtggatggggatcatctatcctggagatgctgatgccagatacagcccgtccttccaaggccaggtcaccatctcagccgacaagtccatcagcaccgcctacctgcagtggagcagcctgaaggcctcggacaccgccatgtatttctgtgcgaggcggagacaggggatcttcggtgatgctcttgatttctggggccaagggacattggtcaccgtgtcttca

SEQ ID NO: 349 - DNA, 321 bp, synthetic construct
  misc_feature 1..321: note = Description of Artificial Sequence: Synthetic polynucleotide
  misc_feature 1..321: note = LC variable region sequence SST29825
  source 1..321: mol_type = other DNA
gacatccagatgacccagtctccatcctcactgtctgcatctgtaggagacagagtcaccatcacttgtcgggcgagtcagggcattagcaattatttagcctggtatcagcagaaaccagggaaagcccctaaatccctgatctatgctgcatccagtttgcaaagtggggtcccatcaaggttcagcggcagtggatctgggacagatttcactctcaccatcagcagcctgcagcctgaagattttgcaacttattactgccaacagtatagtacttacccattcactttcggccaagggaccaaagtggatatcaaa

SEQ ID NO: 350 - DNA, 363 bp, synthetic construct
  misc_feature 1..363: note = Description of Artificial Sequence: Synthetic polynucleotide
  misc_feature 1..363: note = HC variable region sequence SST29825
  source 1..363: mol_type = other DNA
caggtgcagctggtgcagtctggggctgaggtgaagaagcctggggcctcagtgaaggtgtcctgcaaggcttctggatacaccttcaccggctactatatccactgggtgcgacaggcccctggacaagggcttgagtggatgggatggatcaacccttacagtggtggcacaacctctgcacagaagtttcagggcagggtcaccatgaccagggacacgtccaccagctcagcctacatggaactgagcaggctgagatctgacgacacggccgtgtattactgtgcgagagatgcaggctacctggccctctacggtacggacgtctggggccaagggaccttggtcaccgtgtcctca

SEQ ID NO: 351 - DNA, 726 bp, synthetic construct
  misc_feature 1..726: note = Description of Artificial Sequence: Synthetic polynucleotide
  misc_feature 1..726: note = NA sequence LC SST28347
  source 1..726: mol_type = other DNA
atggacatgagggtgcccgctcagctcctggggctcctgctgctgtggctgagaggtgcgcgctgtgacatcgtgatgacccagtctccagactccctggctgtgtctctgggcgagagggccaccatcaactgcaagtccagccagagtgttttatacagctccaacaataagcacttcttagcttggtaccagcagaaaccaggacagcctcctaagctgctcatttactgggcatctacccgggagtccggggtccctgaccgattcagtggcagcgggtctgggacagatttcactctcaccatcagcagcctgcaggctgaagatgtggcagtttattactgtcagcaatattatagtactccgctcactttcggcggagggaccaaggtggagatcaaacgaacggtggctgcaccatctgtcttcatcttcccgccatctgatgagcagttgaaatctggaactgcctctgttgtgtgcctgctgaataacttctatcccagagaggccaaagtacagtggaaggtggataacgccctccaatcgggtaactcccaggagagtgtcacagagcaggacagcaaggacagcacctacagcctcagcagcaccctgacgctgagcaaagcagactacgagaaacacaaagtctacgcctgcgaagtcacccatcagggcctgagctcgcccgtcacaaagagcttcaacaggggagagtgt

SEQ ID NO: 352 - DNA, 1413 bp, synthetic construct
  misc_feature 1..1413: note = Description of Artificial Sequence: Synthetic polynucleotide
  misc_feature 1..1413: note = NA sequence HC SST28347
  source 1..1413: mol_type = other DNA
atggacatgagggtgcccgctcagctcctggggctcctgctgctgtggctgagaggtgcgcgctgtgaggtgcagctgttggagtctgggggaggcttggtacagcctggggggtccctgagactctcctgtgcagcctctggattcacctttagcagctatgccatgagctgggtccgccaggctccagggaagggactggagtgggtctcagctattagtggtagtggtggtagcacatactacgcagaatccgtgaagggccggttcaccatctccagagacaattccaagaacacgctgtatctgcaaatgaacagcctgagagccgaggacacggccgtatattactgtgcgaaggcgtatacacctatggcattctttgactactggggccagggaaccctggtcaccgtctcctcagcctccaccaagggcccatcggtcttccccctggcaccctcctccaagagcacctctgggggcacagcggccctgggctgcctggtcaaggactacttccccgaaccggtgacggtgtcgtggaactcaggcgccctgaccagcggcgtgcacaccttcccggctgtcctacagtcctcaggactctactccctcagcagcgtggtgaccgtgccctccagcagcttgggcacccagacctacatctgcaacgtgaatcacaagcccagcaacaccaaggtggacaagaaagttgagcccaaatcttgtgacaaaactcacacatgcccaccgtgcccagcacctgaactcctggggggaccgtcagtcttcctcttccccccaaaacccaaggacaccctcatgatctcccggacccctgaggtcacatgcgtggtggtggacgtgagccacgaagaccctgaggtcaagttcaactggtacgtggacggcgtggaggtgcataatgccaagacaaagccgtgcgaggagcagtacggcagcacgtaccgttgcgtcagcgtcctcaccgtcctgcaccaggactggctgaatggcaaggagtacaagtgcaaggtgtccaacaaagccctcccagcccccatcgagaaaaccatctccaaagccaaagggcagccccgagaaccacaggtgtacaccctgcccccatcccgggaggagatgaccaagaaccaggtcagcctgacctgcctggtcaaaggcttctatcccagcgacatcgccgtggagtgggagagcaatgggcagccggagaacaactacaagaccacgcctcccgtgctggactccgacggctccttcttcctctatagcaagctcaccgtggacaagagcaggtggcagcaggggaacgtcttctcatgctccgtgatgcatgaggctctgcacaaccactacacgcagaagagcctctccctgtctccgggcaaa

SEQ ID NO: 353 - DNA, 1404 bp, synthetic construct
  misc_feature 1..1404: note = Description of Artificial Sequence: Synthetic polynucleotide
  misc_feature 1..1404: note = NA sequence HC SST204812
  source 1..1404: mol_type = other DNA
atggacatgagggtgcccgctcagctcctggggctcctgctgctgtggctgagaggtgcgcgctgtgaggtgcagctgttggagtctgggggaggcttggtacagcctggggggtccctgagactctcctgtgcagcctctggattcacctttagcagctatgccatgagctgggtccgccaggctccagggaagggactggagtgggtgtcagctattagtggtagtggtggtagcacatactacgcagaatccgtgaagggccggttcaccatctccagagacaattccaagaacacgctgtatctgcaaatgaacagcctgagagccgaggacacggccgtatattactgtgcgaaggcgtatacacctatggcattctttgactactggggccagggaaccctggtcaccgtgtcctcagcctccaccaagggcccatcggtcttccccctggcgcccagctccaggagcacctccgagagcacagcggccctgggctgcctggtcaaggactacttccccgaaccggtgacggtgtcgtggaactcaggcgctctgaccagcggcgtgcacaccttcccagctgtcctacagtcctcaggactctactccctcagcagcgtggtgaccgtgccctccagcaacttcggcacccagacctacacctgcaacgtagatcacaagcccagcaacaccaaggtggacaagacagttgagcgcaaatgttgtgtcgagtgcccaccgtgcccagcacctgaactcctggggggaccgtcagtcttcctcttccccccaaaacccaaggacaccctcatgatctcccggacccctgaggtcacatgcgtggtggtggacgtgagccacgaagaccctgaggtcaagttcaactggtacgtggacggcgtggaggtgcataatgccaagacaaagccgtgcgaggagcagtacggcagcacgtaccgttgcgtcagcgtcctcaccgtcctgcaccaggactggctgaatggcaaggagtacaagtgcaaggtgtccaacaaagccctcccagcccccatcgagaaaaccatctccaaagccaaagggcagccccgagaaccacaggtgtacaccctgcccccatcccgggaggagatgaccaagaaccaggtcagcctgacctgcctggtcaaaggcttctatcccagcgacatcgccgtggagtgggagagcaatgggcagccggagaacaactacaagaccacgcctcccgtgctggactccgacggctccttcttcctctatagcaagctcaccgtggacaagagcaggtggcagcaggggaacgtcttctcatgctccgtgatgcatgaggctctgcacaaccactacacgcagaagagcctctccctgtctccgggcaaa

SEQ ID NO: 354 - DNA, 708 bp, synthetic construct
  misc_feature 1..708: note = Description of Artificial Sequence: Synthetic polynucleotide
  misc_feature 1..708: note = NA sequence LC SST29857
  source 1..708: mol_type = other DNA
atggacatgagggtgcccgctcagctcctggggctcctgctgctgtggctgagaggtgcgcgctgtgacatccagatgacccagtctccatcttccgtgtctgcatctgtaggagacagagtcaccatcacttgtcgggcgagtcagggtattagcagctggttagcctggtatcagcagaaaccagggaaagcccctaagctcctgatctatgctgcatccagtttgcaaagtggggtcccatcaaggttcagcggcagtggatctgggacagatttcactctcaccatcagcagcctgcagcctgaagattttgcaacttacttttgtcaacaggctgacgctttccctcgcacttttggccaggggaccaagctggagatcaaacgaacggtggctgcaccatctgtcttcatcttcccgccatctgatgagcagttgaaatctggaactgcctctgttgtgtgcctgctgaataacttctatcccagagaggccaaagtacagtggaaggtggataacgccctccaatcgggtaactcccaggagagtgtcacagagcaggacagcaaggacagcacctacagcctcagcagcaccctgacgctgagcaaagcagactacgagaaacacaaagtctacgcctgcgaagtcacccatcagggcctgagctcgcccgtcacaaagagcttcaacaggggagagtgt

SEQ ID NO: 355 - DNA, 1416 bp, synthetic construct
  misc_feature 1..1416: note = Description of Artificial Sequence: Synthetic polynucleotide
  misc_feature 1..1416: note = NA sequence HC SST29857
  source 1..1416: mol_type = other DNA
atggacatgagggtgcccgctcagctcctggggctcctgctgctgtggctgagaggtgcgcgctgtgaggtgcagctggtgcagtctggagcagaggtgaaaaagcccggggagtctctgaagatctcctgtaagggttctggatacagttttaccagctactggatcgcctgggtgcgccagatgcccgggaaaggcctggagtggatggggatcatctatcctggtgacgctgatgccagatacagcccgtccttccaaggccaggtcaccatctcagccgacaagtccatcagcaccgcctacctacagtggagcagcctgaaggcctcggacaccgccatgtatttctgtgcgagacaaaggacgttttattatgatagtagtgattattttgactactggggccagggaaccctggtcaccgtgtcctcagcctccaccaagggcccatcggtcttccccctggcgcccagctccaggagcacctccgagagcacagcggccctgggctgcctggtcaaggactacttccccgaaccggtgacggtgtcgtggaactcaggcgctctgaccagcggcgtgcacaccttcccagctgtcctacagtcctcaggactctactccctcagcagcgtggtgaccgtgccctccagcaacttcggcacccagacctacacctgcaacgtagatcacaagcccagcaacaccaaggtggacaagacagttgagcgcaaatgttgtgtcgagtgcccaccgtgcccagcacctgaactcctggggggaccgtcagtcttcctcttccccccaaaacccaaggacaccctcatgatctcccggacccctgaggtcacatgcgtggtggtggacgtgagccacgaagaccctgaggtcaagttcaactggtacgtggacggcgtggaggtgcataatgccaagacaaagccgtgcgaggagcagtacggcagcacgtaccgttgcgtcagcgtcctcaccgtcctgcaccaggactggctgaatggcaaggagtacaagtgcaaggtgtccaacaaagccctcccagcccccatcgagaaaaccatctccaaagccaaagggcagccccgagaaccacaggtgtacaccctgcccccatcccgggaggagatgaccaagaaccaggtcagcctgacctgcctggtcaaaggcttctatcccagcgacatcgccgtggagtgggagagcaatgggcagccggagaacaactacaagaccacgcctcccgtgctggactccgacggctccttcttcctctatagcaagctcaccgtggacaagagcaggtggcagcaggggaacgtcttctcatgctccgtgatgcatgaggctctgcacaaccactacacgcagaagagcctctccctgtctccgggcaaa

SEQ ID NO: 356 - DNA, 708 bp, synthetic construct
  misc_feature 1..708: note = Description of Artificial Sequence: Synthetic polynucleotide
  misc_feature 1..708: note = NA sequence LC SST202443
  source 1..708: mol_type = other DNA
atggacatgagggtgcccgctcagctcctggggctcctgctgctgtggctgagaggtgcgcgctgtgaaatagtgatgacgcagtctccagccaccctgtctgtgtctccaggggaaagagccaccctctcctgcagggccagtcagagtgttagcagcaacttagcctggttccagcagaaacctggccaggctcccaggctcctcatctatggtgcttccaccagggccactggtattccagccaggttcagtggcagtgggtctgggacagagttcactctcaccatcagcagcctgcagcctgaagattttgcagtttattactgtctgcaggataataatttccctcccactttcggccaagggaccaaagtggatatcaaacgaacggtggctgcaccatctgtcttcatcttcccgccatctgatgagcagttgaaatctggaactgcctctgttgtgtgcctgctgaataacttctatcccagagaggccaaagtacagtggaaggtggataacgccctccaatcgggtaactcccaggagagtgtcacagagcaggacagcaaggacagcacctacagcctcagcagcaccctgacgctgagcaaagcagactacgagaaacacaaagtctacgcctgcgaagtcacccatcagggcctgagctcgcccgtcacaaagagcttcaacaggggagagtgt

SEQ ID NO: 357 - DNA, 1419 bp, synthetic construct
  misc_feature 1..1419: note = Description of Artificial Sequence: Synthetic polynucleotide
  misc_feature 1..1419: note = NA sequence HC SST202443
  source 1..1419: mol_type = other DNA
atggacatgagggtgcccgctcagctcctggggctcctgctgctgtggctgagaggtgcgcgctgtgaggtgcagctggtgcagtctggagcagaggtgaaaaagcccggggagtctctgaagatctcctgtaagggttctggatacagctttaccagctactggatcggctgggtgcgccagatgcccgggaaaggcctggagtggatggggatcatctatcctggagatgctgatgccagatacagcccgtccttccaaggccaggtcaccatctcagccgacaagtccatcagcaccgcctacctgcagtggagcagcctgaaggcctcggacaccgccatgtatttctgtgcgaggcggagacaggggatcttcggtgatgctcttgatttctggggccaagggacattggtcaccgtgtcttcagcctccaccaagggcccatcggtcttccccctggcaccctcctccaagagcacctctgggggcacagcggccctgggctgcctggtcaaggactacttccccgaaccggtgacggtgtcgtggaactcaggcgccctgaccagcggcgtgcacaccttcccggctgtcctacagtcctcaggactctactccctcagcagcgtggtgaccgtgccctccagcagcttgggcacccagacctacatctgcaacgtgaatcacaagcccagcaacaccaaggtggacaagaaagttgagcccaaatcttgtgacaaaactcacacatgcccaccgtgcccagcacctgaactcctggggggaccgtcagtcttcctcttccccccaaaacccaaggacaccctcatgatctcccggacccctgaggtcacatgcgtggtggtggacgtgagccacgaagaccctgaggtcaagttcaactggtacgtggacggcgtggaggtgcataatgccaagacaaagccgtgcgaggagcagtacggcagcacgtaccgttgcgtcagcgtcctcaccgtcctgcaccaggactggctgaatggcaaggagtacaagtgcaaggtgtccaacaaagccctcccagcccccatcgagaaaaccatctccaaagccaaagggcagccccgagaaccacaggtgtacaccctgcccccatcccgggaggagatgaccaagaaccaggtcagcctgacctgcctggtcaaaggcttctatcccagcgacatcgccgtggagtgggagagcaatgggcagccggagaacaactacaagaccacgcctcccgtgctggactccgacggctccttcttcctctatagcaagctcaccgtggacaagagcaggtggcagcaggggaacgtcttctcatgctccgtgatgcatgaggctctgcacaaccactacacgcagaagagcctctccctgtctccgggcaaa

SEQ ID NO: 358 - DNA, 708 bp, synthetic construct
  misc_feature 1..708: note = Description of Artificial Sequence: Synthetic polynucleotide
  misc_feature 1..708: note = NA sequence LC SST29825
  source 1..708: mol_type = other DNA
atggacatgagggtgcccgctcagctcctggggctcctgctgctgtggctgagaggtgcgcgctgtgacatccagatgacccagtctccatcctcactgtctgcatctgtaggagacagagtcaccatcacttgtcgggcgagtcagggcattagcaattatttagcctggtatcagcagaaaccagggaaagcccctaaatccctgatctatgctgcatccagtttgcaaagtggggtcccatcaaggttcagcggcagtggatctgggacagatttcactctcaccatcagcagcctgcagcctgaagattttgcaacttattactgccaacagtatagtacttacccattcactttcggccaagggaccaaagtggatatcaaacgaacggtggctgcaccatctgtcttcatcttcccgccatctgatgagcagttgaaatctggaactgcctctgttgtgtgcctgctgaataacttctatcccagagaggccaaagtacagtggaaggtggataacgccctccaatcgggtaactcccaggagagtgtcacagagcaggacagcaaggacagcacctacagcctcagcagcaccctgacgctgagcaaagcagactacgagaaacacaaagtctacgcctgcgaagtcacccatcagggcctgagctcgcccgtcacaaagagcttcaacaggggagagtgt

SEQ ID NO: 359 - DNA, 1410 bp, synthetic construct
  misc_feature 1..1410: note = Description of Artificial Sequence: Synthetic polynucleotide
  misc_feature 1..1410: note = NA sequence HC SST29825
  source 1..1410: mol_type = other DNA
atggacatgagggtgcccgctcagctcctggggctcctgctgctgtggctgagaggtgcgcgctgtcaggtgcagctggtgcagtctggggctgaggtgaagaagcctggggcctcagtgaaggtgtcctgcaaggcttctggatacaccttcaccggctactatatccactgggtgcgacaggcccctggacaagggcttgagtggatgggatggatcaacccttacagtggtggcacaacctctgcacagaagtttcagggcagggtcaccatgaccagggacacgtccaccagctcagcctacatggaactgagcaggctgagatctgacgacacggccgtgtattactgtgcgagagatgcaggctacctggccctctacggtacggacgtctggggccaagggaccttggtcaccgtgtcctcagcctccaccaagggcccatcggtcttccccctggcgcccagctccaggagcacctccgagagcacagcggccctgggctgcctggtcaaggactacttccccgaaccggtgacggtgtcgtggaactcaggcgctctgaccagcggcgtgcacaccttcccagctgtcctacagtcctcaggactctactccctcagcagcgtggtgaccgtgccctccagcaacttcggcacccagacctacacctgcaacgtagatcacaagcccagcaacaccaaggtggacaagacagttgagcgcaaatgttgtgtcgagtgcccaccgtgcccagcacctgaactcctggggggaccgtcagtcttcctcttccccccaaaacccaaggacaccctcatgatctcccggacccctgaggtcacatgcgtggtggtggacgtgagccacgaagaccctgaggtcaagttcaactggtacgtggacggcgtggaggtgcataatgccaagacaaagccgtgcgaggagcagtacggcagcacgtaccgttgcgtcagcgtcctcaccgtcctgcaccaggactggctgaatggcaaggagtacaagtgcaaggtgtccaacaaagccctcccagcccccatcgagaaaaccatctccaaagccaaagggcagccccgagaaccacaggtgtacaccctgcccccatcccgggaggagatgaccaagaaccaggtcagcctgacctgcctggtcaaaggcttctatcccagcgacatcgccgtggagtgggagagcaatgggcagccggagaacaactacaagaccacgcctcccgtgctggactccgacggctccttcttcctctatagcaagctcaccgtggacaagagcaggtggcagcaggggaacgtcttctcatgctccgtgatgcatgaggctctgcacaaccactacacgcagaagagcctctccctgtctccgggcaaa

SEQ ID NO: 360 - protein, 10 aa, synthetic construct
  REGION 1..10: note = Description of Artificial Sequence: Synthetic peptide
  REGION 1..10: note = Peptides from epitope mapping experiments
HRDAGDLWFP

SEQ ID NO: 361 - protein, 9 aa, synthetic construct
  REGION 1..9: note = Description of Artificial Sequence: Synthetic peptide
  REGION 1..9: note = Peptides from epitope mapping experiments
AGDLWFPGE

SEQ ID NO: 362 - protein, 10 aa, synthetic construct
  REGION 1..10: note = Description of Artificial Sequence: Synthetic peptide
  REGION 1..10: note = Peptides from epitope mapping experiments
GDLWFPGESE

SEQ ID NO: 363 - protein, 14 aa, synthetic construct
  REGION 1..14: note = Description of Artificial Sequence: Synthetic peptide
  REGION 1..14: note = Peptides from epitope mapping experiments
HRDAGDLWFPGESE

SEQ ID NO: 364 - protein, 17 aa, synthetic construct
  REGION 1..17: note = Description of Artificial Sequence: Synthetic peptide
  REGION 1..17: note = Peptides from epitope mapping experiments
PLDHRDAGDLWFPGESE

SEQ ID NO: 365 - protein, 17 aa, synthetic construct
  REGION 1..17: note = Description of Artificial Sequence: Synthetic peptide
  REGION 1..17: note = Peptides from epitope mapping experiments
PLDHRDAGDAWFPGESE

SEQ ID NO: 366 - protein, 17 aa, synthetic construct
  REGION 1..17: note = Description of Artificial Sequence: Synthetic peptide
  REGION 1..17: note = Peptides from epitope mapping experiments
PLDHRDAGDLWAPGESE

SEQ ID NO: 367 - protein, 6 aa, synthetic construct
  REGION 1..6: note = Description of Artificial Sequence: Synthetic peptide
  REGION 1..6: note = Peptides from epitope mapping experiments
GDLWFP

SEQ ID NO: 368 - protein, 17 aa, synthetic construct
  REGION 1..17: note = Description of Artificial Sequence: Synthetic peptide
  REGION 1..17: note = CDRH2 Antibody ID 24G6 SST28 Variant
AISGSGGSTYYAESVKG

SEQ ID NO: 369 - protein, 7 aa, synthetic construct
  REGION 1..7: note = Description of Artificial Sequence: Synthetic peptide
  REGION 1..7: note = CDRL2 Antibody ID 6E7 SST29 Variant
AASSLQS

SEQ ID NO: 370 - protein, 9 aa, synthetic construct
  REGION 1..9: note = Description of Artificial Sequence: Synthetic peptide
  REGION 1..9: note = CDRL3 Antibody ID 6E7 SST29 Variant
QQADAFPRT

SEQ ID NO: 371 - protein, 17 aa, synthetic construct
  REGION 1..17: note = Description of Artificial Sequence: Synthetic peptide
  REGION 1..17: note = CDRH2 Antibody ID 6E7 SST29 Variant
IIYPGDADARYSPSFQG

SEQ ID NO: 372 - protein, 9 aa, synthetic construct
  REGION 1..9: note = Description of Artificial Sequence: Synthetic peptide
  REGION 1..9: note = CDRL3 Antibody ID 13E7 SST20 Variant
LQDNNFPPT

SEQ ID NO: 373 - protein, 17 aa, synthetic construct
  REGION 1..17: note = Description of Artificial Sequence: Synthetic peptide
  REGION 1..17: note = CDRH2 Antibody ID 13E7 SST20 Variant
IIYPGDADARYSPSFQG

SEQ ID NO: 374 - protein, 12 aa, synthetic construct
  REGION 1..12: note = Description of Artificial Sequence: Synthetic peptide
  REGION 1..12: note = CDRH3 Antibody ID 13E7 SST20 Variant
RRQGIFGDALDF

SEQ ID NO: 375 - protein, 12 aa, synthetic construct
  REGION 1..12: note = Description of Artificial Sequence: Synthetic peptide
  REGION 1..12: note = CDRH3 Antibody ID 5E3 SST29 Variant
DAGYLALYGTDV

SEQ ID NO: 376 - protein, 113 aa, Homo sapiens; identical to SEQ ID NO: 3

SEQ ID NO: 377 - protein, 9 aa, synthetic construct
  REGION 1..9: note = Description of Artificial Sequence: Synthetic peptide
  REGION 1..9: note = Synthetic Construct
FTFSSYAMS

SEQ ID NO: 378 - protein, 9 aa, synthetic construct
  REGION 1..9: note = Description of Artificial Sequence: Synthetic peptide
  REGION 1..9: note = Synthetic Construct
FTFSSSAMS

SEQ ID NO: 379 - protein, 9 aa, synthetic construct
  REGION 1..9: note = Description of Artificial Sequence: Synthetic peptide
  REGION 1..9: note = Synthetic Construct
GTFSSYAIS

SEQ ID NO: 380 - protein, 9 aa, synthetic construct
  REGION 1..9: note = Description of Artificial Sequence: Synthetic peptide
  REGION 1..9: note = Synthetic Construct
YTFTSYYIH

SEQ ID NO: 381 - protein, 9 aa, synthetic construct
  REGION 1..9: note = Description of Artificial Sequence: Synthetic peptide
  REGION 1..9: note = Synthetic Construct
YTFTSYYMH

SEQ ID NO: 382 - protein, 11 aa, synthetic construct
  REGION 1..11: note = Description of Artificial Sequence: Synthetic peptide
  REGION 1..11: note = Synthetic Construct
GSISSSSYYWG

SEQ ID NO: 383 - protein, 9 aa, synthetic construct
  REGION 1..9: note = Description of Artificial Sequence: Synthetic peptide
  REGION 1..9: note = Synthetic Construct
YSFTSYWIG

SEQ ID NO: 384 - protein, 9 aa, synthetic construct
  REGION 1..9: note = Description of Artificial Sequence: Synthetic peptide
  REGION 1..9: note = Synthetic Construct
YSFTSNWIG

SEQ ID NO: 385 - protein, 9 aa, synthetic construct
  REGION 1..9: note = Description of Artificial Sequence: Synthetic peptide
  REGION 1..9: note = Synthetic Construct
YSFTTYWIG

SEQ ID NO: 386 - protein, 9 aa, synthetic construct
  REGION 1..9: note = Description of Artificial Sequence: Synthetic peptide
  REGION 1..9: note = Synthetic Construct
YTFTSYGIS

SEQ ID NO: 387 - protein, 11 aa, synthetic construct
  REGION 1..11: note = Description of Artificial Sequence: Synthetic peptide
  REGION 1..11: note = Synthetic Construct
GSISSGGYYWS

SEQ ID NO: 388 - protein, 11 aa, synthetic construct
  REGION 1..11: note = Description of Artificial Sequence: Synthetic peptide
  REGION 1..11: note = Synthetic Construct
GSISSNSYYWG

SEQ ID NO: 389 - protein, 9 aa, synthetic construct
  REGION 1..9: note = Description of Artificial Sequence: Synthetic peptide
  REGION 1..9: note = Synthetic Construct
GSISSYYWS

SEQ ID NO: 390 - protein, 9 aa, synthetic construct
  REGION 1..9: note = Description of Artificial Sequence: Synthetic peptide
  REGION 1..9: note = Synthetic Construct
FTFSSYGMH

SEQ ID NO: 391 - protein, 9 aa, synthetic construct
  REGION 1..9: note = Description of Artificial Sequence: Synthetic peptide
  REGION 1..9: note = Synthetic Construct
FTFSTYGMH

SEQ ID NO: 392 - protein, 9 aa, synthetic construct
  REGION 1..9: note = Description of Artificial Sequence: Synthetic peptide
  REGION 1..9: note = Synthetic Construct
FTFSTYAMS

SEQ ID NO: 393 - protein, 9 aa, synthetic construct
  REGION 1..9: note = Description of Artificial Sequence: Synthetic peptide
  REGION 1..9: note = Synthetic Construct
YTFTGSYMH

SEQ ID NO: 394 - protein, 9 aa, synthetic construct
  REGION 1..9: note = Description of Artificial Sequence: Synthetic peptide
  REGION 1..9: note = Synthetic Construct
YTFTGYYMH

SEQ ID NO: 395 - protein, 9 aa, synthetic construct
  REGION 1..9: note = Description of Artificial Sequence: Synthetic peptide
  REGION 1..9: note = Synthetic Construct
YTFTNYGIS

SEQ ID NO: 396 - protein, 9 aa, synthetic construct
  REGION 1..9: note = Description of Artificial Sequence: Synthetic peptide
  REGION 1..9: note = Synthetic Construct
YTFTSYGIH

SEQ ID NO: 397 - protein, 9 aa, synthetic construct
  REGION 1..9: note = Description of Artificial Sequence: Synthetic peptide
  REGION 1..9: note = Synthetic Construct
FTFSSYSMN

SEQ ID NO: 398 - protein, 9 aa, synthetic construct
  REGION 1..9: note = Description of Artificial Sequence: Synthetic peptide
  REGION 1..9: note = Synthetic Construct
GSFSGYYWS

SEQ ID NO: 399 - protein, 17 aa, synthetic construct
  REGION 1..17: note = Description of Artificial Sequence: Synthetic peptide
  REGION 1..17: note = Synthetic Construct
VISGSGGSTYYADSVKG

SEQ ID NO: 400 - protein, 17 aa, synthetic construct
  REGION 1..17: note = Description of Artificial Sequence: Synthetic peptide
  REGION 1..17: note = Synthetic Construct
AISGSGGSTYYADSVKG

SEQ ID NO: 401 - protein, 17 aa, synthetic construct
  REGION 1..17: note = Description of Artificial Sequence: Synthetic peptide
  REGION 1..17: note = Synthetic Construct
GIIPIFGTANYAQKFQG

SEQ ID NO: 402 - protein, 17 aa, synthetic construct
  REGION 1..17: note = Description of Artificial Sequence: Synthetic peptide
  REGION 1..17: note = Synthetic Construct
GIIPIFGTASYAQKFQG

SEQ ID NO: 403 - protein, 17 aa, synthetic construct
  REGION 1..17: note = Description of Artificial Sequence: Synthetic peptide
  REGION 1..17: note = Synthetic Construct
IINPSGGSTSYAQKFQG

SEQ ID NO: 404 - protein, 17 aa, synthetic construct
  REGION 1..17: note = Description of Artificial Sequence: Synthetic peptide
  REGION 1..17: note = Synthetic Construct
IINPGGGSTSYAQKFQG

SEQ ID NO: 405 - protein, 17 aa, synthetic construct
  REGION 1..17: note = Description of Artificial Sequence: Synthetic peptide
  REGION 1..17: note = Synthetic Construct
IINPSGGSTTYAQKFQG

SEQ ID NO: 406 - protein, 16 aa, synthetic construct
  REGION 1..16: note = Description of Artificial Sequence: Synthetic peptide
  REGION 1..16: note = Synthetic Construct
SISYSGSTYYNPSLKS

SEQ ID NO: 407 - protein, 17 aa, synthetic construct
  REGION 1..17: note = Description of Artificial Sequence: Synthetic peptide
  REGION 1..17: note = Synthetic Construct
IIYPGDSDTTYSPSFQG

SEQ ID NO: 408 - protein, 17 aa, synthetic construct
  REGION 1..17: note = Description of Artificial Sequence: Synthetic peptide
  REGION 1..17: note = Synthetic Construct
IIYPGDSDTRYSPSFQG

SEQ ID NO: 409 - protein, 17 aa, synthetic construct
  REGION 1..17: note = Description of Artificial Sequence: Synthetic peptide
  REGION 1..17: note = Synthetic Construct
WISAYNGNTNYAQKLQG

SEQ ID NO: 410 - protein, 16 aa, synthetic construct
  REGION 1..16: note = Description of Artificial Sequence: Synthetic peptide
  REGION 1..16: note = Synthetic Construct
NIYYSGSTVYNPSLKS

SEQ ID NO: 411 - protein, 16 aa, synthetic construct
  REGION 1..16: note = Description of Artificial Sequence: Synthetic peptide
  REGION 1..16: note = Synthetic Construct
SIYYSGSTYYNPSLKS

SEQ ID NO: 412 - protein, 16 aa, synthetic construct
  REGION 1..16: note = Description of Artificial Sequence: Synthetic peptide
  REGION 1..16: note = Synthetic Construct
SIYYSGSTNYNPSLKS

SEQ ID NO: 413 - protein, 17 aa, synthetic construct
  REGION 1..17: note = Description of Artificial Sequence: Synthetic peptide
  REGION 1..17: note = Synthetic Construct
VISYDGSNKYYADSVKG

SEQ ID NO: 414 - protein, 17 aa, synthetic construct
  REGION 1..17: note = Description of Artificial Sequence: Synthetic peptide
  REGION 1..17: note = Synthetic Construct
LIWYDGSNKYYADSVKG

SEQ ID NO: 415 - protein, 17 aa, synthetic construct
  REGION 1..17: note = Description of Artificial Sequence: Synthetic peptide
  REGION 1..17: note = Synthetic Construct
VIWYDGSNKYYADSVKG

SEQ ID NO: 416 - protein, 17 aa, synthetic construct
  REGION 1..17: note = Description of Artificial Sequence: Synthetic peptide
  REGION 1..17: note = Synthetic Construct
WINPNSGGTNYAQKFQG

SEQ ID NO: 417 - protein, 17 aa, synthetic construct
  REGION 1..17: note = Description of Artificial Sequence: Synthetic peptide
  REGION 1..17: note = Synthetic Construct
SINPNSGGTNYAQKFQG

SEQ ID NO: 418 - protein, 17 aa, synthetic construct
  REGION 1..17: note = Description of Artificial Sequence: Synthetic peptide
  REGION 1..17: note = Synthetic Construct
WINPNSGGTSYAQKFQG

SEQ ID NO: 419 - protein, 17 aa, synthetic construct
  REGION 1..17: note = Description of Artificial Sequence: Synthetic peptide
  REGION 1..17: note = Synthetic Construct
WISTYNGNTNYAQKLQG

SEQ ID NO: 420 - protein, 17 aa, synthetic construct
  REGION 1..17: note = Description of Artificial Sequence: Synthetic peptide
  REGION 1..17: note = Synthetic Construct
SISSSSSYIYYADSVKG

SEQ ID NO: 421 - protein, 17 aa, synthetic construct
  REGION 1..17: note = Description of Artificial Sequence: Synthetic peptide
  REGION 1..17: note = Synthetic Construct
YISGSSSTIYYADSVKG

SEQ ID NO: 422 - protein, 16 aa, synthetic construct
  REGION 1..16: note = Description of Artificial Sequence: Synthetic peptide
  REGION 1..16: note = Synthetic Construct
YIYYSGSTVYNPSLKS

SEQ ID NO: 423 - protein, 16 aa, synthetic construct
  REGION 1..16: note = Description of Artificial Sequence: Synthetic peptide
  REGION 1..16: note = Synthetic Construct
EIDHSGSTKYNPSLKS

SEQ ID NO: 424 - protein, 11 aa, synthetic construct
  REGION 1..11: note = Description of Artificial Sequence: Synthetic peptide
  REGION 1..11: note = Synthetic Construct
AKGTPTLLFQH

SEQ ID NO: 425 - protein, 21 aa, synthetic construct
  REGION 1..21: note = Description of Artificial Sequence: Synthetic peptide
  REGION 1..21: note = Synthetic Construct
AKVPSYDYWSGYSNYYYYMDV

SEQ ID NO: 426 - protein, 11 aa, synthetic construct
  REGION 1..11: note = Description of Artificial Sequence: Synthetic peptide
  REGION 1..11: note = Synthetic Construct
AREQYHVGMDV

SEQ ID NO: 427 - protein, 10 aa, synthetic construct
  REGION 1..10: note = Description of Artificial Sequence: Synthetic peptide
  REGION 1..10: note = Synthetic Construct
ARGVDSIMDY

SEQ ID NO: 428 - protein, 13 aa, synthetic construct
  REGION 1..13: note = Description of Artificial Sequence: Synthetic peptide
  REGION 1..13: note = Synthetic Construct
ARAPQESPYVFDI

SEQ ID NO: 429 - protein, 13 aa, synthetic construct
  REGION 1..13: note = Description of Artificial Sequence: Synthetic peptide
  REGION 1..13: note = Synthetic Construct
ARGSPTYGYLYDP

SEQ ID NO: 430 - protein, 10 aa, synthetic construct
  REGION 1..10: note = Description of Artificial Sequence: Synthetic peptide
  REGION 1..10: note = Synthetic Construct
ARTSSKERDY

SEQ ID NO: 431 - protein, 13 aa, synthetic construct
  REGION 1..13: note = Description of Artificial Sequence: Synthetic peptide
  REGION 1..13: note = Synthetic Construct
ARGPYRLLLGMDV

SEQ ID NO: 432 - protein, 14 aa, synthetic construct
  REGION 1..14: note = Description of Artificial Sequence: Synthetic peptide
  REGION 1..14: note = Synthetic Construct
ARLHISGEVNWFDP

SEQ ID NO: 433 - protein, 15 aa, synthetic construct
  REGION 1..15: note = Description of Artificial Sequence: Synthetic peptide
  REGION 1..15: note = Synthetic Construct
AREAGYDYGELAFDI

SEQ ID NO: 434 - protein, 15 aa, synthetic construct
  REGION 1..15: note = Description of Artificial Sequence: Synthetic peptide
  REGION 1..15: note = Synthetic Construct
ARAGHYDGGHLGMDV

SEQ ID NO: 435 - protein, 17 aa, synthetic construct
  REGION 1..17: note = Description of Artificial Sequence: Synthetic peptide
  REGION 1..17: note = Synthetic Construct
ARLGHYSGTVSSYGMDV

SEQ ID NO: 436 - protein, 11 aa, synthetic construct
  REGION 1..11: note = Description of Artificial Sequence: Synthetic peptide
  REGION 1..11: note = Synthetic Construct
ARGPSHYYDLA

SEQ ID NO: 437 - protein, 12 aa, synthetic construct
  REGION 1..12: note = Description of Artificial Sequence: Synthetic peptide
  REGION 1..12: note = Synthetic Construct
ARGLYGYGVLDV

SEQ ID NO: 438 - protein, 12 aa, synthetic construct
  REGION 1..12: note = Description of Artificial Sequence: Synthetic peptide
  REGION 1..12: note = Synthetic Construct
ARGVLGYGVFDY

SEQ ID NO: 439 - protein, 16 aa, synthetic construct
  REGION 1..16: note = Description of Artificial Sequence: Synthetic peptide
  REGION 1..16: note = Synthetic Construct
ARDGGGEYPSGTPFDI

SEQ ID NO: 440 - protein, 11 aa, synthetic construct
  REGION 1..11: note = Description of Artificial Sequence: Synthetic peptide
  REGION 1..11: note = Synthetic Construct
ARSGMASFFDY

SEQ ID NO: 441 - protein, 10 aa, synthetic construct
  REGION 1..10: note = Description of Artificial Sequence: Synthetic peptide
  REGION 1..10: note = Synthetic Construct
AKLGGHSMDV

SEQ ID NO: 442 - protein, 11 aa, synthetic construct
  REGION 1..11: note = Description of Artificial Sequence: Synthetic peptide
  REGION 1..11: note = Synthetic Construct
AKPLKRGRGFY

SEQ ID NO: 443 - protein, 10 aa, synthetic construct
  REGION 1..10: note = Description of Artificial Sequence: Synthetic peptide
  REGION 1..10: note = Synthetic Construct
AKEGRTITMD

SEQ ID NO: 444 - protein, 10 aa, synthetic construct
  REGION 1..10: note = Description of Artificial Sequence: Synthetic peptide
  REGION 1..10: note = Synthetic Construct
AKDQYSVLDY

SEQ ID NO: 445 - protein, 13 aa, synthetic construct
  REGION 1..13: note = Description of Artificial Sequence: Synthetic peptide
  REGION 1..13: note = Synthetic Construct
AKKYSSRGVYFDY

SEQ ID NO: 446 - protein, 17 aa, synthetic construct
  REGION 1..17: note = Description of Artificial Sequence: Synthetic peptide
  REGION 1..17: note = Synthetic Construct
ARLGGAVGARHVTYFDY

SEQ ID NO: 447 - protein, 14 aa, synthetic construct
  REGION 1..14: note = Description of Artificial Sequence: Synthetic peptide
  REGION 1..14: note = Synthetic Construct
ARGQYYGGSGWFDP

SEQ ID NO: 448 - protein, 12 aa, synthetic construct
  REGION 1..12: note = Description of Artificial Sequence: Synthetic peptide
  REGION 1..12: note = Synthetic Construct
ARLGQEYAYFQH

SEQ ID NO: 449 - protein, 14 aa, synthetic construct
  REGION 1..14: note = Description of Artificial Sequence: Synthetic peptide
  REGION 1..14: note = Synthetic Construct
ARRRDGYYDEVFDI

SEQ ID NO: 450 - protein, 12 aa, synthetic construct
  REGION 1..12: note = Description of Artificial Sequence: Synthetic peptide
  REGION 1..12: note = Synthetic Construct
ARVPKHYVVLDY

SEQ ID NO: 451 - protein, 10 aa, synthetic construct
  REGION 1..10: note = Description of Artificial Sequence: Synthetic peptide
  REGION 1..10: note = Synthetic Construct
ARAGGHLFDY

SEQ ID NO: 452 - protein, 15 aa, synthetic construct
  REGION 1..15: note = Description of Artificial Sequence: Synthetic peptide
  REGION 1..15: note = Synthetic Construct
ARDRGGEYVDFAFDI

SEQ ID NO: 453 - protein, 15 aa, synthetic construct
  REGION 1..15: note = Description of Artificial Sequence: Synthetic peptide
  REGION 1..15: note = Synthetic Construct
ARTRSGYGASNYFDY

SEQ ID NO: 454 - protein, 15 aa, synthetic construct
  REGION 1..15: note = Description of Artificial Sequence: Synthetic peptide
  REGION 1..15: note = Synthetic Construct
ARGTGAAAASPAFDI

SEQ ID NO: 455 - protein, 12 aa, synthetic construct
  REGION 1..12: note = Description of Artificial Sequence: Synthetic peptide
  REGION 1..12: note = Synthetic Construct
ARVGQYMLGMDV

SEQ ID NO: 456 - protein, 18 aa, synthetic construct
  REGION 1..18: note = Description of Artificial Sequence: Synthetic peptide
  REGION 1..18: note = Synthetic Construct
ARGAPVDYGGIEPEYFQH

SEQ ID NO: 457 - protein, 12 aa, synthetic construct
  REGION 1..12: note = Description of Artificial Sequence: Synthetic peptide
  REGION 1..12: note = Synthetic Construct
AKHYHVGIAFDI

SEQ ID NO: 458 - protein, 13 aa, synthetic construct
  REGION 1..13: note = Description of Artificial Sequence: Synthetic peptide
  REGION 1..13: note = Synthetic Construct
ARAMARKSVAFDI

SEQ ID NO: 459 - protein, 14 aa, synthetic construct
  REGION 1..14: note = Description of Artificial Sequence: Synthetic peptide
  REGION 1..14: note = Synthetic Construct
AKVPSYQRGTAFDP

SEQ ID NO: 460 - protein, 14 aa, synthetic construct
  REGION 1..14: note = Description of Artificial Sequence: Synthetic peptide
  REGION 1..14: note = Synthetic Construct
AKSPAVAGIYRADY

SEQ ID NO: 461 - protein, 17 aa, synthetic construct
  REGION 1..17: note = Description of Artificial Sequence: Synthetic peptide
  REGION 1..17: note = Synthetic Construct
ARGPGYTTALDYYYMDV

SEQ ID NO: 462 - protein, 9 aa, synthetic construct
  REGION 1..9: note = Description of Artificial Sequence: Synthetic peptide
  REGION 1..9: note = Synthetic Construct
ARPAKTADY

SEQ ID NO: 463 - protein, 9 aa, synthetic construct
  REGION 1..9: note = Description of Artificial Sequence: Synthetic peptide
  REGION 1..9: note = Synthetic Construct
ARPGKSMDV

SEQ ID NO: 464 - protein, 14 aa, synthetic construct
  REGION 1..14: note = Description of Artificial Sequence: Synthetic peptide
  REGION 1..14: note = Synthetic Construct
ARGVGGQDYYYMDV

SEQ ID NO: 465 - protein, 13 aa, synthetic construct
  REGION 1..13: note = Description of Artificial Sequence: Synthetic peptide
  REGION 1..13: note = Synthetic Construct
ARGPLYHPMIFDY

SEQ ID NO: 466 - protein, 8 aa, synthetic construct
  REGION 1..8: note = Description of Artificial Sequence: Synthetic peptide
  REGION 1..8: note = Synthetic Construct
ARASSVDN

SEQ ID NO: 467 - protein, 19 aa, synthetic construct
  REGION 1..19: note = Description of Artificial Sequence: Synthetic peptide
  REGION 1..19: note = Synthetic Construct
ARGPTKAYYGSGSYVVFDP

SEQ ID NO: 468 - protein, 15 aa, synthetic construct
  REGION 1..15: note = Description of Artificial Sequence: Synthetic peptide
  REGION 1..15: note = Synthetic Construct
ARLGIYSTGATAFDI

SEQ ID NO: 469 - protein, 12 aa, synthetic construct
  REGION 1..12: note = Description of Artificial Sequence: Synthetic peptide
  REGION 1..12: note = Synthetic Construct
ARGGVWYSLFDI

SEQ ID NO: 470 - protein, 9 aa, synthetic construct
  REGION 1..9: note = Description of Artificial Sequence: Synthetic peptide
  REGION 1..9: note = Synthetic Construct
ARASKMGDD

SEQ ID NO: 471 - protein, 13 aa, synthetic construct
  REGION 1..13: note = Description of Artificial Sequence: Synthetic peptide
  REGION 1..13: note = Synthetic Construct
ARGGVPRVSYFQH

SEQ ID NO: 472 - protein, 16 aa, synthetic construct
  REGION 1..16: note = Description of Artificial Sequence: Synthetic peptide
  REGION 1..16: note = Synthetic Construct
ARAGHYDDWSGLGLDV

SEQ ID NO: 473 - protein, 13 aa, synthetic construct
  REGION 1..13: note = Description of Artificial Sequence: Synthetic peptide
  REGION 1..13: note = Synthetic Construct
ARGSGSGYDSWYD

SEQ ID NO: 474 - protein, 15 aa, synthetic construct
  REGION 1..15: note = Description of Artificial Sequence: Synthetic peptide
  REGION 1..15: note = Synthetic Construct
ARLGRWSSGSTAFDI

SEQ ID NO: 475 - protein, 15 aa, synthetic construct
  REGION 1..15: note = Description of Artificial Sequence: Synthetic peptide
  REGION 1..15: note = Synthetic Construct
ARLGRKPSGSVAFDI

SEQ ID NO: 476 - protein, 10 aa, synthetic construct
  REGION 1..10: note = Description of Artificial Sequence: Synthetic peptide
  REGION 1..10: note = Synthetic Construct
ARAGHKTHDY

SEQ ID NO: 477 - protein, 9 aa, synthetic construct
  REGION 1..9: note = Description of Artificial Sequence: Synthetic peptide
  REGION 1..9: note = Synthetic Construct
AKPGSMTDY

SEQ ID NO: 478 - protein, 10 aa, synthetic construct
  REGION 1..10: note = Description of Artificial Sequence: Synthetic peptide
  REGION 1..10: note = Synthetic Construct
ARAKSVDHDY

SEQ ID NO: 479 - protein, 15 aa, synthetic construct
  REGION 1..15: note = Description of Artificial Sequence: Synthetic peptide
  REGION 1..15: note = Synthetic Construct
ARDISTHDYDLAFDI

SEQ ID NO: 480 - protein, 11 aa, synthetic construct
  REGION 1..11: note = Description of Artificial Sequence: Synthetic peptide
  REGION 1..11: note = Synthetic Construct
ARSGTETLFDY

SEQ ID NO: 481 - protein, 14 aa, synthetic construct
  REGION 1..14: note = Description of Artificial Sequence: Synthetic peptide
  REGION 1..14: note = Synthetic Construct
ARAKMLDDGYAFDI

SEQ ID NO: 482 - protein, 14 aa, synthetic construct
  REGION 1..14: note = Description of Artificial Sequence: Synthetic peptide
  REGION 1..14: note = Synthetic Construct
ARDLGYSSLLALDI

SEQ ID NO: 483 - protein, 15 aa, synthetic construct
  REGION 1..15: note = Description of Artificial Sequence: Synthetic peptide
  REGION 1..15: note = Synthetic Construct
ARGGGRRGDNNWFDP

SEQ ID NO: 484 - protein, 10 aa, synthetic construct
  REGION 1..10: note = Description of Artificial Sequence: Synthetic peptide
  REGION 1..10: note = Synthetic Construct
ARGPPHEMDY

SEQ ID NO: 485 - protein, 12 aa, synthetic construct
  REGION 1..12: note = Description of Artificial Sequence: Synthetic peptide
  REGION 1..12: note = Synthetic Construct
ARTPYPWIYFDL

SEQ ID NO: 486 - protein, 13 aa, synthetic construct
  REGION 1..13: note = Description of Artificial Sequence: Synthetic peptide
  REGION 1..13: note = Synthetic Construct
ARGGRRHYGGMDV

SEQ ID NO: 487 - protein, 15 aa, synthetic construct
  REGION 1..15: note = Description of Artificial Sequence: Synthetic peptide
  REGION 1..15: note = Synthetic Construct
ARGGGTFWSGSWALY

SEQ ID NO: 488 - protein, 16 aa, synthetic construct
  REGION 1..16: note = Description of Artificial Sequence: Synthetic peptide
  REGION 1..16: note = Synthetic Construct
ARDSGNYDYWSGALRY

SEQ ID NO: 489 - protein, 10 aa, synthetic construct
  REGION 1..10: note = Description of Artificial Sequence: Synthetic peptide
  REGION 1..10: note = Synthetic Construct
ARVSSSWYKA

SEQ ID NO: 490 - protein, 17 aa, synthetic construct
  REGION 1..17: note = Description of Artificial Sequence: Synthetic peptide
  REGION 1..17: note = Synthetic Construct
ARVGVVVGRPGYSAFDI

SEQ ID NO: 491 - protein, 17 aa, synthetic construct
  REGION 1..17: note = Description of Artificial Sequence: Synthetic peptide
  REGION 1..17: note = Synthetic Construct
AKDLGGYYGGAAYGMDV

SEQ ID NO: 492 - protein, 15 aa, synthetic construct
  REGION 1..15: note = Description of Artificial Sequence: Synthetic peptide
  REGION 1..15: note = Synthetic Construct
AKDGVYYGLGNWFDP

SEQ ID NO: 493 - protein, 13 aa, synthetic construct
  REGION 1..13: note = Description of Artificial Sequence: Synthetic peptide
  REGION 1..13: note = Synthetic Construct
ARHGWDRVGWFDP

SEQ ID NO: 494 - protein, 11 aa, synthetic construct
  REGION 1..11: note = Description of Artificial Sequence: Synthetic peptide
  REGION 1..11: note = Synthetic Construct
RASQSVSSNLA

SEQ ID NO: 495 - protein, 11 aa, synthetic construct
  REGION 1..11: note = Description of Artificial Sequence: Synthetic peptide
  REGION 1..11: note = Synthetic Construct
RASQSVGSNLA

SEQ ID NO: 496 - protein, 11 aa, synthetic construct
  REGION 1..11: note = Description of Artificial Sequence: Synthetic peptide
  REGION 1..11: note = Synthetic Construct
QASQDISNYLN

SEQ ID NO: 497 - protein, 12 aa, synthetic construct
  REGION 1..12: note = Description of Artificial Sequence: Synthetic peptide
  REGION 1..12: note = Synthetic Construct
RASQSVSSSYLA

SEQ ID NO: 498 - protein, 11 aa, synthetic construct
  REGION 1..11: note = Description of Artificial Sequence: Synthetic peptide
  REGION 1..11: note = Synthetic Construct
RASQSVSSYLA

SEQ ID NO: 499 - protein, 11 aa, synthetic construct
  REGION 1..11: note = Description of Artificial Sequence: Synthetic peptide
  REGION 1..11: note = Synthetic Construct
RASQSISSYLN

SEQ ID NO: 500 - protein, 12 aa, synthetic construct
  REGION 1..12: note = Description of Artificial Sequence: Synthetic peptide
  REGION 1..12: note = Synthetic Construct
RASQSVSSDYLA

SEQ ID NO: 501 - protein, 17 aa, synthetic construct
  REGION 1..17: note = Description of Artificial Sequence: Synthetic peptide
  REGION 1..17: note = Synthetic Construct
KSSQSVLYSSNNKNYLA

SEQ ID NO: 502 - protein, 11 aa, synthetic construct
  REGION 1..11: note = Description of Artificial Sequence: Synthetic peptide
  REGION 1..11: note = Synthetic Construct
QASQDISNFLN

SEQ ID NO: 503 - protein, 11 aa, synthetic construct
  REGION 1..11: note = Description of Artificial Sequence: Synthetic peptide
  REGION 1..11: note = Synthetic Construct
RASQSISRYLN

SEQ ID NO: 504 - protein, 11 aa, synthetic construct
  REGION 1..11: note = Description of Artificial Sequence: Synthetic peptide
  REGION 1..11: note = Synthetic Construct
RASQSINSYLN

SEQ ID NO: 505 - protein, 11 aa, synthetic construct
  REGION 1..11: note = Description of Artificial Sequence: Synthetic peptide
  REGION 1..11: note = Synthetic Construct
RASQSISSWLA

SEQ ID NO: 506 - protein, 11 aa, synthetic construct
  REGION 1..11: note = Description of Artificial Sequence: Synthetic peptide
  REGION 1..11: note = Synthetic Construct
RASQGIDSWLA

SEQ ID NO: 507 - protein, 11 aa, synthetic construct
  REGION 1..11: note = Description of Artificial Sequence: Synthetic peptide
  REGION 1..11: note = Synthetic Construct
QASQDITNYLN

SEQ ID NO: 508 - protein, 16 aa, synthetic construct
  REGION 1..16: note = Description of Artificial Sequence: Synthetic peptide
  REGION 1..16: note = Synthetic Construct
RSSQSLLHSNGYNYLD

SEQ ID NO: 509 - protein, 11 aa, synthetic construct
  REGION 1..11: note = Description of Artificial Sequence: Synthetic peptide
  REGION 1..11: note = Synthetic Construct
RASQGISSWLA

SEQ ID NO: 510 - protein, 11 aa, synthetic construct
  REGION 1..11: note = Description of Artificial Sequence: Synthetic peptide
  REGION 1..11: note = Synthetic Construct
RASQDISSWLA

SEQ ID NO: 511 - protein, 11 aa, synthetic construct
  REGION 1..11: note = Description of Artificial Sequence: Synthetic peptide
  REGION 1..11: note = Synthetic Construct
RASQSVSRYLA

SEQ ID NO: 512 - protein, 7 aa, synthetic construct
  REGION 1..7: note = Description of Artificial Sequence: Synthetic peptide
  REGION 1..7: note = Synthetic Construct
GASTRAT

SEQ ID NO: 513 - protein, 7 aa, synthetic construct
  REGION 1..7: note = Description of Artificial Sequence: Synthetic peptide
  REGION 1..7: note = Synthetic Construct
DASNLAT

SEQ ID NO: 514 - protein, 7 aa, synthetic construct
  REGION 1..7: note = Description of Artificial Sequence: Synthetic peptide
  REGION 1..7: note = Synthetic Construct
SASTRAT

SEQ ID NO: 515 - protein, 7 aa, synthetic construct
  REGION 1..7: note = Description of Artificial Sequence: Synthetic peptide
  REGION 1..7: note = Synthetic Construct
GASSRAT

SEQ ID NO: 516 - protein, 7 aa, synthetic construct
  REGION 1..7: note = Description of Artificial Sequence: Synthetic peptide
  REGION 1..7: note = Synthetic Construct
DASKRAT

SEQ ID NO: 517 - protein, 7 aa, synthetic construct
  REGION 1..7: note = Description of Artificial Sequence: Synthetic peptide
  REGION 1..7: note = Synthetic Construct
GASSLQS

SEQ ID NO: 518 - protein, 7 aa, synthetic construct
  REGION 1..7: note = Description of Artificial Sequence: Synthetic peptide
  REGION 1..7: note = Synthetic Construct
DASNRAT

SEQ ID NO: 519 - protein, 7 aa, synthetic construct
  REGION 1..7: note = Description of Artificial Sequence: Synthetic peptide
  REGION 1..7: note = Synthetic Construct
AASSLQS

SEQ ID NO: 520 - protein, 7 aa, synthetic construct
  REGION 1..7: note = Description of Artificial Sequence: Synthetic peptide
  REGION 1..7: note = Synthetic Construct
DASNLET

SEQ ID NO: 521 - protein, 7 aa, synthetic construct
  REGION 1..7: note = Description of Artificial Sequence: Synthetic peptide
  REGION 1..7: note = Synthetic Construct
WASTRES

SEQ ID NO: 522 - protein, 7 aa, synthetic construct
  REGION 1..7: note = Description of Artificial Sequence: Synthetic peptide
  REGION 1..7: note = Synthetic Construct
DSSNRAT

SEQ ID NO: 523 - protein, 7 aa, synthetic construct
  REGION 1..7: note = Description of Artificial Sequence: Synthetic peptide
  REGION 1..7: note = Synthetic Construct
DASSLES

SEQ ID NO: 524 - protein, 7 aa, synthetic construct
  REGION 1..7: note = Description of Artificial Sequence: Synthetic peptide
  REGION 1..7: note = Synthetic Construct
GASNRAT

SEQ ID NO: 525 - protein, 7 aa, synthetic construct
  REGION 1..7: note = Description of Artificial Sequence: Synthetic peptide
  REGION 1..7: note = Synthetic Construct
LGSHRAS

SEQ ID NO: 526 - protein, 7 aa, synthetic construct
  REGION 1..7: note = Description of Artificial Sequence: Synthetic peptide
  REGION 1..7: note = Synthetic Construct
KASSLES

SEQ ID NO: 527 - protein, 9 aa, synthetic construct
  REGION 1..9: note = Description of Artificial Sequence: Synthetic peptide
  REGION 1..9: note = Synthetic Construct
QQLPYWPPT

SEQ ID NO: 528 - protein, 9 aa, synthetic construct
  REGION 1..9: note = Description of Artificial Sequence: Synthetic peptide
  REGION 1..9: note = Synthetic Construct
QQYFFYPPT

SEQ ID NO: 529 - protein, 9 aa, synthetic construct
  REGION 1..9: note = Description of Artificial Sequence: Synthetic peptide
  REGION 1..9: note = Synthetic Construct
QQPFNFPYT

SEQ ID NO: 530 - protein, 9 aa, synthetic construct
  REGION 1..9: note = Description of Artificial Sequence: Synthetic peptide
  REGION 1..9: note = Synthetic Construct
QQDHDYPFT

SEQ ID NO: 531 - protein, 9 aa, synthetic construct
  REGION 1..9: note = Description of Artificial Sequence: Synthetic peptide
  REGION 1..9: note = Synthetic Construct
QQYFSSPFT

SEQ ID NO: 532 - protein, 9 aa, synthetic construct
  REGION 1..9: note = Description of Artificial Sequence: Synthetic peptide
  REGION 1..9: note = Synthetic Construct
QQRVNLPPT

SEQ ID NO: 533 - protein, 9 aa, synthetic construct
  REGION 1..9: note = Description of Artificial Sequence: Synthetic peptide
  REGION 1..9: note = Synthetic Construct
QQRISYPIT

SEQ ID NO: 534 - protein, 9 aa, synthetic construct
  REGION 1..9: note = Description of Artificial Sequence: Synthetic peptide
  REGION 1..9: note = Synthetic Construct
QQIDDTPIT

SEQ ID NO: 535 - protein, 9 aa, synthetic construct
  REGION 1..9: note = Description of Artificial Sequence: Synthetic peptide
  REGION 1..9: note = Synthetic Construct
QQFSYWPWT

SEQ ID NO: 536 - protein, 9 aa, synthetic construct
  REGION 1..9: note = Description of Artificial Sequence: Synthetic peptide
  REGION 1..9: note = Synthetic Construct
QQHDSSPPT

SEQ ID NO: 537 - protein, 9 aa, synthetic construct
  REGION 1..9: note = Description of Artificial Sequence: Synthetic peptide
  REGION 1..9: note = Synthetic Construct
QQDYSYPWT

SEQ ID NO: 538 - protein, 9 aa, synthetic construct
  REGION 1..9: note = Description of Artificial Sequence: Synthetic peptide
  REGION 1..9: note = Synthetic Construct
QQEYAVPYT

SEQ ID NO: 539 - protein, 9 aa, synthetic construct
  REGION 1..9: note = Description of Artificial Sequence: Synthetic peptide
  REGION 1..9: note = Synthetic Construct
QQVSNYPIT

SEQ ID NO: 540 - protein, 9 aa, synthetic construct
  REGION 1..9: note = Description of Artificial Sequence: Synthetic peptide
  REGION 1..9: note = Synthetic Construct
QQVDNIPPT

SEQ ID NO: 541 - protein, 8 aa, synthetic construct
  REGION 1..8: note = Description of Artificial Sequence: Synthetic peptide
  REGION 1..8: note = Synthetic Construct
QQFDTYPT

SEQ ID NO: 542 - protein, 8 aa, synthetic construct
  REGION 1..8: note = Description of Artificial Sequence: Synthetic peptide
  REGION 1..8: note = Synthetic Construct
QQFLNFPT

SEQ ID NO: 543 - protein, 8 aa, synthetic construct
  REGION 1..8: note = Description of Artificial Sequence: Synthetic peptide
  REGION 1..8: note = Synthetic Construct
QQFFNFPT

SEQ ID NO: 544 - protein, 9 aa, synthetic construct
  REGION 1..9: note = Description of Artificial Sequence: Synthetic peptide
  REGION 1..9: note = Synthetic Construct
QQFIDLPFT

SEQ ID NO: 545 - protein, 9 aa, synthetic construct
  REGION 1..9: note = Description of Artificial Sequence: Synthetic peptide
  REGION 1..9: note = Synthetic Construct
QQYYDLPFT

SEQ ID NO: 546 - protein, 9 aa, synthetic construct
  REGION 1..9: note = Description of Artificial Sequence: Synthetic peptide
  REGION 1..9: note = Synthetic Construct
QQFSSHPFT

SEQ ID NO: 547 - protein, 9 aa, synthetic construct
  REGION 1..9: note = Description of Artificial Sequence: Synthetic peptide
  REGION 1..9: note = Synthetic Construct
QQDDRSPYT

SEQ ID NO: 548 - protein, 9 aa, synthetic construct
  REGION 1..9: note = Description of Artificial Sequence: Synthetic peptide
  REGION 1..9: note = Synthetic Construct
QQAYLPPIT

SEQ ID NO: 549 - protein, 10 aa, synthetic construct
  REGION 1..10: note = Description of Artificial Sequence: Synthetic peptide
  REGION 1..10: note = Synthetic Construct
QQAFSPPPWT

SEQ ID NO: 550 - protein, 8 aa, synthetic construct
  REGION 1..8: note = Description of Artificial Sequence: Synthetic peptide
  REGION 1..8: note = Synthetic Construct
QQDDRSPT

SEQ ID NO: 551 - protein, 9 aa, synthetic construct
  REGION 1..9: note = Description of Artificial Sequence: Synthetic peptide
  REGION 1..9: note = Synthetic Construct
QQEFDLPFT

SEQ ID NO: 552 - protein, 9 aa, synthetic construct
  REGION 1..9: note = Description of Artificial Sequence: Synthetic peptide
  REGION 1..9: note = Synthetic Construct
QQYNNFPPT

SEQ ID NO: 553 - protein, 9 aa, synthetic construct
  REGION 1..9: note = Description of Artificial Sequence: Synthetic peptide
  REGION 1..9: note = Synthetic Construct
QQRYLRPIT

SEQ ID NO: 554 - protein, 8 aa, synthetic construct
  REGION 1..8: note = Description of Artificial Sequence: Synthetic peptide
  REGION 1..8: note = Synthetic Construct
QQPGAVPT

SEQ ID NO: 555 - protein, 9 aa, synthetic construct
  REGION 1..9: note = Description of Artificial Sequence: Synthetic peptide
  REGION 1..9: note = Synthetic Construct
QQVYITPIT

SEQ ID NO: 556 - protein, 9 aa, synthetic construct
  REGION 1..9: note = Description of Artificial Sequence: Synthetic peptide
  REGION 1..9: note = Synthetic Construct
QQPVDLPFT

SEQ ID NO: 557 - protein, 9 aa, synthetic construct
  REGION 1..9: note = Description of Artificial Sequence: Synthetic peptide
  REGION 1..9: note = Synthetic Construct
QQYSFFPPT

SEQ ID NO: 558 - protein, 9 aa, synthetic construct
  REGION 1..9: note = Description of Artificial Sequence: Synthetic peptide
  REGION 1..9: note = Synthetic Construct
QQDSSFPPT

SEQ ID NO: 559 - protein, 9 aa, synthetic construct
  REGION 1..9: note = Description of Artificial Sequence: Synthetic peptide
  REGION 1..9: note = Synthetic Construct
QQSDFPPWT

SEQ ID NO: 560 - protein, 9 aa, synthetic construct
  REGION 1..9: note = Description of Artificial Sequence: Synthetic peptide
  REGION 1..9: note = Synthetic Construct
QQGYSAPIT

SEQ ID NO: 561 - protein, 8 aa, synthetic construct
  REGION 1..8: note = Description of Artificial Sequence: Synthetic peptide
  REGION 1..8: note = Synthetic Construct
QQLFDWPT

SEQ ID NO: 562 - protein, 8 aa, synthetic construct
  REGION 1..8: note = Description of Artificial Sequence: Synthetic peptide
  REGION 1..8: note = Synthetic Construct
QQRAFLFT

SEQ ID NO: 563 - protein, 9 aa, synthetic construct
  REGION 1..9: note = Description of Artificial Sequence: Synthetic peptide
  REGION 1..9: note = Synthetic Construct
QQIDFLPYT

SEQ ID NO: 564 - protein, 9 aa, synthetic construct
  REGION 1..9: note = Description of Artificial Sequence: Synthetic peptide
  REGION 1..9: note = Synthetic Construct
QQVYSPPIT

SEQ ID NO: 565 - protein, 9 aa, synthetic construct
  REGION 1..9: note = Description of Artificial Sequence: Synthetic peptide
  REGION 1..9: note = Synthetic Construct
QQGYAAPIT

SEQ ID NO: 566 - protein, 9 aa, synthetic construct
  REGION 1..9: note = Description of Artificial Sequence: Synthetic peptide
  REGION 1..9: note = Synthetic Construct
QQRYALPIT

SEQ ID NO: 567 - protein, 9 aa, synthetic construct
  REGION 1..9: note = Description of Artificial Sequence: Synthetic peptide
  REGION 1..9: note = Synthetic Construct
QQYASPPIT

SEQ ID NO: 568 - protein, 9 aa, synthetic construct
  REGION 1..9: note = Description of Artificial Sequence: Synthetic peptide
  REGION 1..9: note = Synthetic Construct
QQVYSTPIT

SEQ ID NO: 569 - protein, 8 aa, synthetic construct
  REGION 1..8: note = Description of Artificial Sequence: Synthetic peptide
  REGION 1..8: note = Synthetic Construct
QQLVHWPT

SEQ ID NO: 570 - protein, 8 aa, synthetic construct
  REGION 1..8: note = Description of Artificial Sequence: Synthetic peptide
  REGION 1..8: note = Synthetic Construct
QQLDDWFT

SEQ ID NO: 571 - protein, 9 aa, synthetic construct
  REGION 1..9: note = Description of Artificial Sequence: Synthetic peptide
  REGION 1..9: note = Synthetic Construct
QQRSNYPIT

SEQ ID NO: 572 - protein, 9 aa, synthetic construct
  REGION 1..9: note = Description of Artificial Sequence: Synthetic peptide
  REGION 1..9: note = Synthetic Construct
QQRILYPIT

SEQ ID NO: 573 - protein, 9 aa, synthetic construct
  REGION 1..9: note = Description of Artificial Sequence: Synthetic peptide
  REGION 1..9: note = Synthetic Construct
QQRAAYPIT

SEQ ID NO: 574 - protein, 9 aa, synthetic construct
  REGION 1..9: note = Description of Artificial Sequence: Synthetic peptide
  REGION 1..9: note = Synthetic Construct
QQRTSHPIT

SEQ ID NO: 575 - protein, 9 aa, synthetic construct
  REGION 1..9: note = Description of Artificial Sequence: Synthetic peptide
  REGION 1..9: note = Synthetic Construct
QQYAGSPFT

SEQ ID NO: 576 - protein, 8 aa, synthetic construct
  REGION 1..8: note = Description of Artificial Sequence: Synthetic peptide
  REGION 1..8: note = Synthetic Construct
QQFDDVFT

SEQ ID NO: 577 - protein, 9 aa, synthetic construct
  REGION 1..9: note = Description of Artificial Sequence: Synthetic peptide
  REGION 1..9: note = Synthetic Construct
QQYVNSPFT

SEQ ID NO: 578 - protein, 9 aa, synthetic construct
  REGION 1..9: note = Description of Artificial Sequence: Synthetic peptide
  REGION 1..9: note = Synthetic Construct
QQSDDDPFT

SEQ ID NO: 579 - protein, 9 aa, synthetic construct
  REGION 1..9: note = Description of Artificial Sequence: Synthetic peptide
  REGION 1..9: note = Synthetic Construct
QQLSTYPLT

SEQ ID NO: 580 - protein, 9 aa, synthetic construct
  REGION 1..9: note = Description of Artificial Sequence: Synthetic peptide
  REGION 1..9: note = Synthetic Construct
QQRSVYPIT

SEQ ID NO: 581 - protein, 9 aa, synthetic construct
  REGION 1..9: note = Description of Artificial Sequence: Synthetic peptide
  REGION 1..9: note = Synthetic Construct
QQVSLFPLT

SEQ ID NO: 582 - protein, 10 aa, synthetic construct
  REGION 1..10: note = Description of Artificial Sequence: Synthetic peptide
  REGION 1..10: note = Synthetic Construct
LDYNSYSPIT

SEQ ID NO: 583 - protein, 9 aa, synthetic construct
  REGION 1..9: note = Description of Artificial Sequence: Synthetic peptide
  REGION 1..9: note = Synthetic Construct
QQHIALPFT

SEQ ID NO: 584 - protein, 9 aa, synthetic construct
  REGION 1..9: note = Description of Artificial Sequence: Synthetic peptide
  REGION 1..9: note = Synthetic Construct
QQRASMPIT

SEQ ID NO: 585 - protein, 9 aa, synthetic construct
  REGION 1..9: note = Description of Artificial Sequence: Synthetic peptide
  REGION 1..9: note = Synthetic Construct
QQAFNRPPT

SEQ ID NO: 586 - protein, 9 aa, synthetic construct
  REGION 1..9: note = Description of Artificial Sequence: Synthetic peptide
  REGION 1..9: note = Synthetic Construct
QQSSVHPYT

SEQ ID NO: 587 - protein, 9 aa, synthetic construct
  REGION 1..9: note = Description of Artificial Sequence: Synthetic peptide
  REGION 1..9: note = Synthetic Construct
QQAYSLPPT

SEQ ID NO: 588 - protein, 8 aa, synthetic construct
  REGION 1..8: note = Description of Artificial Sequence: Synthetic peptide
  REGION 1..8: note = Synthetic Construct
QQDDDGYT

SEQ ID NO: 589 - protein, 9 aa, synthetic construct
  REGION 1..9: note = Description of Artificial Sequence: Synthetic peptide
  REGION 1..9: note = Synthetic Construct
QQDYSWPYT

SEQ ID NO: 590 - protein, 9 aa, synthetic construct
  REGION 1..9: note = Description of Artificial Sequence: Synthetic peptide
  REGION 1..9: note = Synthetic Construct
QQRSAYPIT

SEQ ID NO: 591 - protein, 9 aa, synthetic construct
  REGION 1..9: note = Description of Artificial Sequence: Synthetic peptide
  REGION 1..9: note = Synthetic Construct
QQRSHFPIT

SEQ ID NO: 592 - protein, 9 aa, synthetic construct
  REGION 1..9: note = Description of Artificial Sequence: Synthetic peptide
  REGION 1..9: note = Synthetic Construct
QQRANYPIT

SEQ ID NO: 593 - protein, 9 aa, synthetic construct
  REGION 1..9: note = Description of Artificial Sequence: Synthetic peptide
  REGION 1..9: note = Synthetic Construct
QQRADYPIT

SEQ ID NO: 594 - protein, 9 aa, synthetic construct
  REGION 1..9: note = Description of Artificial Sequence: Synthetic peptide
  REGION 1..9: note = Synthetic Construct
QQAGSHPFT

SEQ ID NO: 595 - protein, 9 aa, synthetic construct
  REGION 1..9: note = Description of Artificial Sequence: Synthetic peptide
  REGION 1..9: note = Synthetic Construct
QQDVNYPPT

SEQ ID NO: 596 - protein, 9 aa, synthetic construct
  REGION 1..9: note = Description of Artificial Sequence: Synthetic peptide
  REGION 1..9: note = Synthetic Construct
QQDDNYPYT

SEQ ID NO: 597 - protein, 9 aa, synthetic construct
  REGION 1..9: note = Description of Artificial Sequence: Synthetic peptide
  REGION 1..9: note = Synthetic Construct
QQRSTFPIT

SEQ ID NO: 598 - protein, 9 aa, synthetic construct
  REGION 1..9: note = Description of Artificial Sequence: Synthetic peptide
  REGION 1..9: note = Synthetic Construct
QQVSNYPFT

SEQ ID NO: 599 - protein, 9 aa, synthetic construct
  REGION 1..9: note = Description of Artificial Sequence: Synthetic peptide
  REGION 1..9: note = Synthetic Construct
QQYHDAPIT

SEQ ID NO: 600 - protein, 9 aa, synthetic construct
  REGION 1..9: note = Description of Artificial Sequence: Synthetic peptide
  REGION 1..9: note = Synthetic Construct
QQAYVVPPT

SEQ ID NO: 601 - protein, 9 aa, synthetic construct
  REGION 1..9: note = Description of Artificial Sequence: Synthetic peptide
  REGION 1..9: note = Synthetic Construct
QQADNWPFT

SEQ ID NO: 602 - protein, 9 aa, synthetic construct
  REGION 1..9: note = Description of Artificial Sequence: Synthetic peptide
  REGION 1..9: note = Synthetic Construct
MQALESPRT

SEQ ID NO: 603 - protein, 9 aa, synthetic construct
  REGION 1..9: note = Description of Artificial Sequence: Synthetic peptide
  REGION 1..9: note = Synthetic Construct
QQYVNWPFT

SEQ ID NO: 604 - protein, 9 aa, synthetic construct
  REGION 1..9: note = Description of Artificial Sequence: Synthetic peptide
  REGION 1..9: note = Synthetic Construct
QQSSNWPWT

SEQ ID NO: 605 - protein, 9 aa, synthetic construct
  REGION 1..9: note = Description of Artificial Sequence: Synthetic peptide
  REGION 1..9: note = Synthetic Construct
QQASTFPIT

SEQ ID NO: 606 - protein, 9 aa, synthetic construct
  REGION 1..9: note = Description of Artificial Sequence: Synthetic peptide
  REGION 1..9: note = Synthetic Construct
QQRNSLPLT

SEQ ID NO: 607 - protein, 9 aa, synthetic construct
  REGION 1..9: note = Description of Artificial Sequence: Synthetic peptide
  REGION 1..9: note = Synthetic Construct
QQSYDFPIT

SEQ ID NO: 608 - protein, 10 aa, synthetic construct
  REGION 1..10: note = Description of Artificial Sequence: Synthetic peptide
  REGION 1..10: note = Synthetic Construct
QQEVDYPPLT

SEQ ID NO: 609 - protein, 9 aa, synthetic construct
  REGION 1..9: note = Description of Artificial Sequence: Synthetic peptide
  REGION 1..9: note = Synthetic Construct
QQLNSYSPT

SEQ ID NO: 610 - protein, 9 aa, synthetic construct
  REGION 1..9: note = Description of Artificial Sequence: Synthetic peptide
  REGION 1..9: note = Synthetic Construct
QQYIFWPPT

SEQ ID NO: 611 - protein, 8 aa, synthetic construct
  REGION 1..8: note = Description of Artificial Sequence: Synthetic peptide
  REGION 1..8: note = Synthetic Construct
GDLWFPGE

SEQ ID NO: 612 - protein, 14 aa, synthetic construct
  REGION 1..14: note = Description of Artificial Sequence: Synthetic peptide
  REGION 1..14: note = Synthetic Construct
DLWFPGESESFEDA

SEQ ID NO: 613 - protein, 14 aa, synthetic construct
  REGION 1..14: note = Description of Artificial Sequence: Synthetic peptide
  REGION 1..14: note = Synthetic Construct
DLWVPEESSSFEGA

SEQ ID NO: 614 - protein, 15 aa, synthetic construct
  REGION 1..15: note = Description of Artificial Sequence: Synthetic peptide
  REGION 1..15: note = Synthetic Construct
ADPLDHRDAGDLWFP

SEQ ID NO: 615 - protein, 13 aa, synthetic construct
  REGION 1..13: note = Description of Artificial Sequence: Synthetic peptide
  REGION 1..13: note = Synthetic Construct
SISRSLLEGEIPF

SEQ ID NO: 616 - protein, 118 aa, synthetic construct
  REGION 1..118: note = Description of Artificial Sequence: Synthetic polypeptide
  REGION 1..118: note = Synthetic Construct
EVQLLESGGGLVQPGGSLRLSCAASGFTFSSYAMSWVRQAPGKGLEWVSVISGSGGSTYYADSVKGRFTISRDNSKNTLYLQMNSLRAEDTAVYYCAKGTPTLLFQHWGQGTLVTVSS

SEQ ID NO: 617 - protein, 107 aa, synthetic construct
  REGION 1..107: note = Description of Artificial Sequence: Synthetic polypeptide
  REGION 1..107: note = Synthetic Construct
EIVMTQSPATLSVSPGERATLSCRASQSVSSNLAWYQQKPGQAPRLLIYGASTRATGIPARFSGSGSGTEFTLTISSLQSEDFAVYYCQQLPYWPPTFGGGTKVEIK

SEQ ID NO: 618 - protein, 128 aa, synthetic construct
  REGION 1..128: note = Description of Artificial Sequence: Synthetic polypeptide
  REGION 1..128: note = Synthetic Construct
EVQLLESGGGLVQPGGSLRLSCAASGFTFSSSAMSWVRQAPGKGLEWVSAISGSGGSTYYADSVKGRFTISRDNSKNTLYLQMNSLRAEDTAVYYCAKVPSYDYWSGYSNYYYYMDVWGKGTTVTVSS

SEQ ID NO: 619 - protein, 107 aa, synthetic construct
  REGION 1..107: note = Description of Artificial Sequence: Synthetic polypeptide
  REGION 1..107: note = Synthetic Construct
EIVLTQSPATLSVSPGERATLSCRASQSVGSNLAWYQQKPGQAPRLLIYGASTRATGIPARFSGSGSGTEFTLTISSLQSEDFAVYYCQQYFFYPPTFGGGTKVEIK

SEQ ID NO: 620 - protein, 118 aa, synthetic construct
  REGION 1..118: note = Description of Artificial Sequence: Synthetic polypeptide
  REGION 1..118: note = Synthetic Construct
QVQLVQSGAEVKKPGSSVKVSCKASGGTFSSYAISWVRQAPGQGLEWMGGIIPIFGTANYAQKFQGRVTITADESTSTAYMELSSLRSEDTAVYYCAREQYHVGMDVWGKGTTVTVSS

SEQ ID NO: 621 - protein, 107 aa, synthetic construct
  REGION 1..107: note = Description of Artificial Sequence: Synthetic polypeptide
  REGION 1..107: note = Synthetic Construct
DIQMTQSPSSLSASVGDRVTITCQASQDISNYLNWYQQKPGKAPKLLIYDASNLATGVPSRFSGSGSGTDFTFTISSLQPEDIATYYCQQPFNFPYTFGGGTKVEIK

SEQ ID NO: 622 - protein, 117 aa, synthetic construct
  REGION 1..117: note = Description of Artificial Sequence: Synthetic polypeptide
  REGION 1..117: note = Synthetic Construct
QVQLVQSGAEVKKPGSSVKVSCKASGGTFSSYAISWVRQAPGQGLEWMGGIIPIFGTASYAQKFQGRVTITADESTSTAYMELSSLRSEDTAVYYCARGVDSIMDYWGQGTLVTVSS

SEQ ID NO: 623 - protein, 107 aa, synthetic construct
  REGION 1..107: note = Description of Artificial Sequence: Synthetic polypeptide
  REGION 1..107: note = Synthetic Construct
EIVMTQSPATLSVSPGERATLSCRASQSVSSNLAWYQQKPGQAPRLLIYSASTRATGIPARFSGSGSGTEFTLTISSLQSEDFAVYYCQQDHDYPFTFGGGTKVEIK

SEQ ID NO: 624 - protein, 120 aa, synthetic construct
  REGION 1..120: note = Description of Artificial Sequence: Synthetic polypeptide
  REGION 1..120: note = Synthetic Construct
QVQLVQSGAEVKKPGASVKVSCKASGYTFTSYYIHWVRQAPGQGLEWMGIINPSGGSTSYAQKFQGRVTMTRDTSTSTVYMELSSLRSEDTAVYYCARAPQESPYVFDIWGQGTMVTVSS

SEQ ID NO: 625 - protein, 108 aa, synthetic construct
  REGION 1..108: note = Description of Artificial Sequence: Synthetic polypeptide
  REGION 1..108: note = Synthetic Construct
EIVMTQSPGTLSLSPGERATLSCRASQSVSSSYLAWYQQKPGQAPRLLIYGASSRATGIPDRFSGSGSGTDFTLTISRLEPEDFAVYYCQQYFSSPFTFGGGTKVEIK

SEQ ID NO: 626 - protein, 120 aa, synthetic construct
  REGION 1..120: note = Description of Artificial Sequence: Synthetic polypeptide
  REGION 1..120: note = Synthetic Construct
QVQLVQSGAEVKKPGASVKVSCKASGYTFTSYYMHWVRQAPGQGLEWMGIINPGGGSTSYAQKFQGRVTMTRDTSTSTVYMELSSLRSEDTAVYYCARGSPTYGYLYDPWGQGTLVTVSS

SEQ ID NO: 627 - protein, 107 aa, synthetic construct
  REGION 1..107: note = Description of Artificial Sequence: Synthetic polypeptide
  REGION 1..107: note = Synthetic Construct
EIVLTQSPATLSLSPGERATLSCRASQSVSSYLAWYQQKPGQAPRLLIYDASKRATGIPARFSGSGSGTDFTLTISSLEPEDFAVYYCQQRVNLPPTFGGGTKVEIK

SEQ ID NO: 628 - protein, 117 aa, synthetic construct
  REGION 1..117: note = Description of Artificial Sequence: Synthetic polypeptide
  REGION 1..117: note = Synthetic Construct
QVQLVQSGAEVKKPGASVKVSCKASGYTFTSYYMHWVRQAPGQGLEWMGIINPSGGSTTYAQKFQGRVTMTRDTSTSTVYMELSSLRSEDTAVYYCARTSSKERDYWGQGTLVTVSS

SEQ ID NO: 629 - protein, 107 aa, synthetic construct
  REGION 1..107: note = Description of Artificial Sequence: Synthetic polypeptide
  REGION 1..107: note = Synthetic Construct
EIVLTQSPATLSLSPGERATLSCRASQSVSSYLAWYQQKPGQAPRLLIYDASKRATGIPARFSGSGSGTDFTLTISSLEPEDFAVYYCQQRISYPITFGGGTKVEIK

SEQ ID NO: 630 - protein, 121 aa, synthetic construct
  REGION 1..121: note = Description of Artificial Sequence: Synthetic polypeptide
  REGION 1..121: note = Synthetic Construct
QLQLQESGPGLVKPSETLSLTCTVSGGSISSSSYYWGWIRQPPGKGLEWIGSISYSGSTYYNPSLKSRVTISVDTSKNQFSLKLSSVTAADTAVYYCARGPYRLLLGMDVWGQGTTVTVSS

SEQ ID NO: 631 - protein, 107 aa, synthetic construct
  REGION 1..107: note = Description of Artificial Sequence: Synthetic polypeptide
  REGION 1..107: note = Synthetic Construct
DIQMTQSPSSLSASVGDRVTITCRASQSISSYLNWYQQKPGKAPKLLIYGASSLQSGVPSRFSGSGSGTDFTLTISSLQPEDFATYYCQQIDDTPITFGGGTKVEIK

SEQ ID NO: 632 - protein, 121 aa, synthetic construct
  REGION 1..121: note = Description of Artificial Sequence: Synthetic polypeptide
  REGION 1..121: note = Synthetic Construct
EVQLVQSGAEVKKPGESLKISCKGSGYSFTSYWIGWVRQMPGKGLEWMGIIYPGDSDTTYSPSFQGQVTISADKSISTAYLQWSSLKASDTAMYYCARLHISGEVNWFDPWGQGTLVTVSS

SEQ ID NO: 633 - protein, 107 aa, synthetic construct
  REGION 1..107: note = Description of Artificial Sequence: Synthetic polypeptide
  REGION 1..107: note = Synthetic Construct
EIVLTQSPATLSLSPGERATLSCRASQSVSSYLAWYQQKPGQAPRLLIYDASNRATGIPARFSGSGSGTDFTLTISSLEPEDFAVYYCQQFSYWPWTFGGGTKVEIK

SEQ ID NO: 634 - protein, 122 aa, synthetic construct
  REGION 1..122: note = Description of Artificial Sequence: Synthetic polypeptide
  REGION 1..122: note = Synthetic Construct
EVQLVQSGAEVKKPGESLKISCKGSGYSFTSNWIGWVRQMPGKGLEWMGIIYPGDSDTRYSPSFQGQVTISADKSISTAYLQWSSLKASDTAMYYCAREAGYDYGELAFDIWGQGTMVTVSS

SEQ ID NO: 635 - protein, 108 aa, synthetic construct
  REGION 1..108: note = Description of Artificial Sequence: Synthetic polypeptide
  REGION 1..108: note = Synthetic Construct
EIVLTQSPGTLSLSPGERATLSCRASQSVSSSYLAWYQQKPGQAPRLLIYGASSRATGIPDRFSGSGSGTDFTLTISRLEPEDFAVYYCQQHDSSPPTFGGGTKVEIK

SEQ ID NO: 636 - protein, 122 aa, synthetic construct
  REGION 1..122: note = Description of Artificial Sequence: Synthetic polypeptide
  REGION 1..122: note = Synthetic Construct
EVQLVQSGAEVKKPGESLKISCKGSGYSFTTYWIGWVRQMPGKGLEWMGIIYPGDSDTRYSPSFQGQVTISADKSISTAYLQWSSLKASDTAMYYCARAGHYDGGHLGMDVWGQGTTVTVSS

SEQ ID NO: 637 - protein, 108 aa, synthetic construct
  REGION 1..108: note = Description of Artificial Sequence: Synthetic polypeptide
  REGION 1..108: note = Synthetic Construct
EIVLTQSPGTLSLSPGERATLSCRASQSVSSDYLAWYQQKPGQAPRLLIYGASSRATGIPDRFSGSGSGTDFTLTISRLEPEDFAVYYCQQDYSYPWTFGGGTKVEIK

SEQ ID NO: 638 - protein, 124 aa, synthetic construct
  REGION 1..124: note = Description of Artificial Sequence: Synthetic polypeptide
  REGION 1..124: note = Synthetic Construct
EVQLVQSGAEVKKPGESLKISCKGSGYSFTSYWIGWVRQMPGKGLEWMGIIYPGDSDTRYSPSFQGQVTISADKSISTAYLQWSSLKASDTAMYYCARLGHYSGTVSSYGMDVWGQGTTVTVSS

SEQ ID NO: 639 - protein, 107 aa, synthetic construct
  REGION 1..107: note = Description of Artificial Sequence: Synthetic polypeptide
  REGION 1..107: note = Synthetic Construct
DIQMTQSPSSLSASVGDRVTITCRASQSISSYLNWYQQKPGKAPKLLIYAASSLQSGVPSRFSGSGSGTDFTLTISSLQPEDFATYYCQQEYAVPYTFGGGTKVEIK

SEQ ID NO: 640 - protein, 118 aa, synthetic construct
  REGION 1..118: note = Description of Artificial Sequence: Synthetic polypeptide
  REGION 1..118: note = Synthetic Construct
QVQLVQSGAEVKKPGASVKVSCKASGYTFTSYGISWVRQAPGQGLEWMGWISAYNGNTNYAQKLQGRVTMTTDTSTSTAYMELRSLRSDDTAVYYCARGPSHYYDLAWGQGTLVTVSS

SEQ ID NO: 641 - protein, 107 aa, synthetic construct
  REGION 1..107: note = Description of Artificial Sequence: Synthetic polypeptide
  REGION 1..107: note = Synthetic Construct
EIVLTQSPATLSLSPGERATLSCRASQSVSSYLAWYQQKPGQAPRLLIYDASNRATGIPARFSGSGSGTDFTLTISSLEPEDFAVYYCQQVSNYPITFGGGTKVEIK

SEQ ID NO: 642 - protein, 120 aa, synthetic construct
  REGION 1..120: note = Description of Artificial Sequence: Synthetic polypeptide
  REGION 1..120: note = Synthetic Construct
QVQLQESGPGLVKPSQTLSLTCTVSGGSISSGGYYWSWIRQHPGKGLEWIGNIYYSGSTVYNPSLKSRVTISVDTSKNQFSLKLSSVTAADTAVYYCARGLYGYGVLDVWGQGTMVTVSS

SEQ ID NO: 643 - protein, 107 aa, synthetic construct
  REGION 1..107: note = Description of Artificial Sequence: Synthetic polypeptide
  REGION 1..107: note = Synthetic Construct
DIQMTQSPSSLSASVGDRVTITCQASQDISNYLNWYQQKPGKAPKLLIYDASNLETGVPSRFSGSGSGTDFTFTISSLQPEDIATYYCQQVDNIPPTFGGGTKVEIK

SEQ ID NO: 644 - protein, 106 aa, synthetic construct
  REGION 1..106: note = Description of Artificial Sequence: Synthetic polypeptide
  REGION 1..106: note = Synthetic Construct
DIQMTQSPSSLSASVGDRVTITCQASQDISNYLNWYQQKPGKAPKLLIYDASNLETGVPSRFSGSGSGTDFTFTISSLQPEDIATYYCQQFDTYPTFGGGTKVEIK

SEQ ID NO: 645 - protein, 120 aa, synthetic construct
  REGION 1..120: note = Description of Artificial Sequence: Synthetic polypeptide
  REGION 1..120: note = Synthetic Construct
QLQLQESGPGLVKPSETLSLTCTVSGGSISSNSYYWGWIRQPPGKGLEWIGSIYYSGSTYYNPSLKSRVTISVDTSKNQFSLKLSSVTAADTAVYYCARGVLGYGVFDYWGQGTLVTVSS

SEQ ID NO: 646 - protein, 106 aa, synthetic construct
  REGION 1..106: note = Description of Artificial Sequence: Synthetic polypeptide
  REGION 1..106: note = Synthetic Construct
DIQMTQSPSSLSASVGDRVTITCQASQDISNYLNWYQQKPGKAPKLLIYDASNLETGVPSRFSGSGSGTDFTFTISSLQPEDIATYYCQQFLNFPTFGGGTKVEIK

SEQ ID NO: 647 - protein, 106 aa, synthetic construct
  REGION 1..106: note = Description of Artificial Sequence: Synthetic polypeptide
  REGION 1..106: note = Synthetic Construct
DIQMTQSPSSLSASVGDRVTITCQASQDISNYLNWYQQKPGKAPKLLIYDASNLETGVPSRFSGSGSGTDFTFTISSLQPEDIATYYCQQFFNFPTFGGGTKVEIK

SEQ ID NO: 648 - protein, 122 aa, synthetic construct
  REGION 1..122: note = Description of Artificial Sequence: Synthetic polypeptide
  REGION 1..122: note = Synthetic Construct
QVQLQESGPGLVKPSETLSLTCTVSGGSISSYYWSWIRQPPGKGLEWIGSIYYSGSTNYNPSLKSRVTISVDTSKNQFSLKLSSVTAADTAVYYCARDGGGEYPSGTPFDIWGQGTMVTVSS

SEQ ID NO: 649 - protein, 107 aa, synthetic construct
  REGION 1..107: note = Description of Artificial Sequence: Synthetic polypeptide
  REGION 1..107: note = Synthetic Construct
DIQMTQSPSSLSASVGDRVTITCQASQDISNYLNWYQQKPGKAPKLLIYDASNLETGVPSRFSGSGSGTDFTFTISSLQPEDIATYYCQQFIDLPFTFGGGTKVEIK

SEQ ID NO: 650 - protein, 107 aa, synthetic construct
  REGION 1..107: note = Description of Artificial Sequence: Synthetic polypeptide
  REGION 1..107: note = Synthetic Construct
DIQMTQSPSSLSASVGDRVTITCQASQDISNYLNWYQQKPGKAPKLLIYDASNLETGVPSRFSGSGSGTDFTFTISSLQPEDIATYYCQQYYDLPFTFGGGTKVEIK

SEQ ID NO: 651 - protein, 117 aa, synthetic construct
  REGION 1..117: note = Description of Artificial Sequence: Synthetic polypeptide
  REGION 1..117: note = Synthetic Construct
QVQLQESGPGLVKPSETLSLTCTVSGGSISSYYWSWIRQPPGKGLEWIGSIYYSGSTNYNPSLKSRVTISVDTSKNQFSLKLSSVTAADTAVYYCARSGMASFFDYWGQGTLVTVSS

SEQ ID NO: 652 - protein, 108 aa, synthetic construct
  REGION 1..108: note = Description of Artificial Sequence: Synthetic polypeptide
  REGION 1..108: note = Synthetic Construct
EIVLTQSPGTLSLSPGERATLSCRASQSVSSDYLAWYQQKPGQAPRLLIYGASSRATGIPDRFSGSGSGTDFTLTISRLEPEDFAVYYCQQFSSHPFTFGGGTKVEIK

SEQ ID NO: 653 - protein, 108 aa, synthetic construct
  REGION 1..108: note = Description of Artificial Sequence: Synthetic polypeptide
  REGION 1..108: note = Synthetic Construct
EIVMTQSPGTLSLSPGERATLSCRASQSVSSSYLAWYQQKPGQAPRLLIYGASSRATGIPDRFSGSGSGTDFTLTISRLEPEDFAVYYCQQDDRSPYTFGGGTKVEIK

SEQ ID NO: 654 - protein, 117 aa, synthetic construct
  REGION 1..117: note = Description of Artificial Sequence: Synthetic polypeptide
  REGION 1..117: note = Synthetic Construct
EVQLLESGGGLVQPGGSLRLSCAASGFTFSSYAMSWVRQAPGKGLEWVSAISGSGGSTYYADSVKGRFTISRDNSKNTLYLQMNSLRAEDTAVYYCAKLGGHSMDVWGQGTTVTVSS

SEQ ID NO: 655 - protein, 113 aa, synthetic construct
  REGION 1..113: note = Description of Artificial Sequence: Synthetic polypeptide
  REGION 1..113: note = Synthetic Construct
DIVMTQSPDSLAVSLGERATINCKSSQSVLYSSNNKNYLAWYQQKPGQPPKLLISWASTRESGVPDRFSGSGSGTDFTLTISSLQAEDVAVYYCQQAYLPPITFGGGTKVEIK

SEQ ID NO: 656 - protein, 118 aa, synthetic construct
  REGION 1..118: note = Description of Artificial Sequence: Synthetic polypeptide
  REGION 1..118: note = Synthetic Construct
EVQLLESGGGLVQPGGSLRLSCAASGFTFSSYAMSWVRQAPGKGLEWVSAISGSGGSTYYADSVKGRFTISRDNSKNTLYLQMNSLRAEDTAVYYCAKPLKRGRGFYWGQGTLVTVSS

SEQ ID NO: 657 - protein, 108 aa, synthetic construct
  REGION 1..108: note = Description of Artificial Sequence: Synthetic polypeptide
  REGION 1..108: note = Synthetic Construct
DIQMTQSPSSLSASVGDRVTITCRASQSISSYLNWYQQKPGKAPKLLIYAASSLQSGVPSRFSGSGSGTDFTLTISSLQPEDFATYYCQQAFSPPPWTFGGGTKVEIK

SEQ ID NO: 658 - protein, 117 aa, synthetic construct
  REGION 1..117: note = Description of Artificial Sequence: Synthetic polypeptide
  REGION 1..117: note = Synthetic Construct
EVQLLESGGGLVQPGGSLRLSCAASGFTFSSYAMSWVRQAPGKGLEWVSVISGSGGSTYYADSVKGRFTISRDNSKNTLYLQMNSLRAEDTAVYYCAKEGRTITMDWGQGTLVTVSS

SEQ ID NO: 659 - protein, 107 aa, synthetic construct
  REGION 1..107: note = Description of Artificial Sequence: Synthetic polypeptide
  REGION 1..107: note = Synthetic Construct
EIVLTQSPGTLSLSPGERATLSCRASQSVSSSYLAWYQQKPGQAPRLLIYGASSRATGIPDRFSGSGSGTDFTLTISRLEPEDFAVYYCQQDDRSPTFGGGTKVEIK

SEQ ID NO: 660 - protein, 117 aa, synthetic construct
  REGION 1..117: note = Description of Artificial Sequence: Synthetic polypeptide
  REGION 1..117: note = Synthetic Construct
EVQLLESGGGLVQPGGSLRLSCAASGFTFSSYAMSWVRQAPGKGLEWVSVISGSGGSTYYADSVKGRFTISRDNSKNTLYLQMNSLRAEDTAVYYCAKDQYSVLDYWGQGTLVTVSS

SEQ ID NO: 661 - protein, 107 aa, synthetic construct
  REGION 1..107: note = Description of Artificial Sequence: Synthetic polypeptide
  REGION 1..107: note = Synthetic Construct
EIVLTQSPATLSLSPGERATLSCRASQSVSSYLAWYQQKPGQAPRLLIYDASNRATGIPARFSGSGSGTDFTLTISSLEPEDFAVYYCQQEFDLPFTFGGGTKVEIK

SEQ ID NO: 662 - protein, 120 aa, synthetic construct
  REGION 1..120: note = Description of Artificial Sequence: Synthetic polypeptide
  REGION 1..120: note = Synthetic Construct
EVQLLESGGGLVQPGGSLRLSCAASGFTFSSYAMSWVRQAPGKGLEWVSAISGSGGSTYYADSVKGRFTISRDNSKNTLYLQMNSLRAEDTAVYYCAKKYSSRGVYFDYWGQGTLVTVSS

SEQ ID NO: 663 - protein, 107 aa, synthetic construct
  REGION 1..107: note = Description of Artificial Sequence: Synthetic polypeptide
  REGION 1..107: note = Synthetic Construct
EIVLTQSPATLSLSPGERATLSCRASQSVSSYLAWYQQKPGQAPRLLIYDASNRATGIPARFSGSGSGTDFTLTISSLEPEDFAVYYCQQYNNFPPTFGGGTKVEIK

SEQ ID NO: 664 - protein, 124 aa, synthetic construct
  REGION 1..124: note = Description of Artificial Sequence: Synthetic polypeptide
  REGION 1..124: note = Synthetic Construct
EVQLLESGGGLVQPGGSLRLSCAASGFTFSSYAMSWVRQAPGKGLEWVSAISGSGGSTYYADSVKGRFTISRDNSKNTLYLQMNSLRAEDTAVYYCARLGGAVGARHVTYFDYWGQGTLVTVSS

SEQ ID NO: 665 - protein, 107 aa, synthetic construct
  REGION 1..107: note = Description of Artificial Sequence: Synthetic polypeptide
  REGION 1..107: note = Synthetic Construct
EIVLTQSPATLSLSPGERATLSCRASQSVSSYLAWYQQKPGQAPRLLIYDASKRATGIPARFSGSGSGTDFTLTISSLEPEDFAVYYCQQRYLRPITFGGGTKVEIK

SEQ ID NO: 666 - protein, 121 aa, synthetic construct
  REGION 1..121: note = Description of Artificial Sequence: Synthetic polypeptide
  REGION 1..121: note = Synthetic Construct
QVQLVESGGGVVQPGRSLRLSCAASGFTFSSYGMHWVRQAPGKGLEWVAVISYDGSNKYYADSVKGRFTISRDNSKNTLYLQMNSLRAEDTAVYYCARGQYYGGSGWFDPWGQGTLVTVSS

SEQ ID NO: 667 - protein, 107 aa, synthetic construct
  REGION 1..107: note = Description of Artificial Sequence: Synthetic polypeptide
  REGION 1..107: note = Synthetic Construct
EIVLTQSPGTLSLSPGERATLSCRASQSVSSSYLAWYQQKPGQAPRLLIYGASSRATGIPDRFSGSGSGTDFTLTISRLEPEDFAVYYCQQPGAVPTFGGGTKVEIK

SEQ ID NO: 668 - protein, 119 aa, synthetic construct
  REGION 1..119: note = Description of Artificial Sequence: Synthetic polypeptide
  REGION 1..119: note = Synthetic Construct
EVQLLESGGGLVQPGGSLRLSCAASGFTFSSYAMSWVRQAPGKGLEWVSAISGSGGSTYYADSVKGRFTISRDNSKNTLYLQMNSLRAEDTAVYYCARLGQEYAYFQHWGQGTLVTVSS

SEQ ID NO: 669 - protein, 107 aa, synthetic construct
  REGION 1..107: note = Description of Artificial Sequence: Synthetic polypeptide
  REGION 1..107: note = Synthetic Construct
DIQMTQSPSSLSASVGDRVTITCRASQSISSYLNWYQQKPGKAPKLLIYGASSLQSGVPSRFSGSGSGTDFTLTISSLQPEDFATYYCQQVYITPITFGGGTKVEIK

SEQ ID NO: 670 - protein, 121 aa, synthetic construct
  REGION 1..121: note = Description of Artificial Sequence: Synthetic polypeptide
  REGION 1..121: note = Synthetic Construct
QVQLVESGGGVVQPGRSLRLSCAASGFTFSSYGMHWVRQAPGKGLEWVALIWYDGSNKYYADSVKGRFTISRDNSKNTLYLQMNSLRAEDTAVYYCARRRDGYYDEVFDIWGQGTMVTVSS

SEQ ID NO: 671 - protein, 107 aa, synthetic construct
  REGION 1..107: note = Description of Artificial Sequence: Synthetic polypeptide
  REGION 1..107: note = Synthetic Construct
DIQLTQSPSSLSASVGDRVTITCQASQDISNFLNWYQQKPGKAPKLLIYDASNLETGVPSRFSGSGSGTDFTFTISSLQPEDIATYYCQQPVDLPFTFGGGTKVEIK

SEQ ID NO: 672 - protein, 119 aa, synthetic construct
  REGION 1..119: note = Description of Artificial Sequence: Synthetic polypeptide
  REGION 1..119: note = Synthetic Construct
EVQLLESGGGLVQPGGSLRLSCAASGFTFSSYAMSWVRQAPGKGLEWVSAISGSGGSTYYADSVKGRFTISRDNSKNTLYLQMNSLRAEDTAVYYCARVPKHYVVLDYWGQGTLVTVSS

SEQ ID NO: 673 - protein, 107 aa, synthetic construct
  REGION 1..107: note = Description of Artificial Sequence: Synthetic polypeptide
  REGION 1..107: note = Synthetic Construct
EIVLTQSPATLSLSPGERATLSCRASQSVSSYLAWYQQKPGQAPRLLIYDASNRATGIPARFSGSGSGTDFTLTISSLEPEDFAVYYCQQYSFFPPTFGGGTKVEIK

SEQ ID NO: 674 - protein, 117 aa, synthetic construct
  REGION 1..117: note = Description of Artificial Sequence: Synthetic polypeptide
  REGION 1..117: note = Synthetic Construct
QVQLVESGGGVVQPGRSLRLSCAASGFTFSSYGMHWVRQAPGKGLEWVAVISYDGSNKYYADSVKGRFTISRDNSKNTLYLQMNSLRAEDTAVYYCARAGGHLFDYWGQGTLVTVSS

SEQ ID NO: 675 - protein, 107 aa, synthetic construct
  REGION 1..107: note = Description of Artificial Sequence: Synthetic polypeptide
  REGION 1..107: note = Synthetic Construct
EIVLTQSPATLSLSPGERATLSCRASQSVSSYLAWYQQKPGQAPRLLIYDASNRATGIPARFSGSGSGTDFTLTISSLEPEDFAVYYCQQDSSFPPTFGGGTKVEIK

SEQ ID NO: 676 - protein, 122 aa, synthetic construct
  REGION 1..122: note = Description of Artificial Sequence: Synthetic polypeptide
  REGION 1..122: note = Synthetic Construct
QVQLVESGGGVVQPGRSLRLSCAASGFTFSSYGMHWVRQAPGKGLEWVAVISYDGSNKYYADSVKGRFTISRDNSKNTLYLQMNSLRAEDTAVYYCARDRGGEYVDFAFDIWGQGTMVTVSS

SEQ ID NO: 677 - protein, 107 aa, synthetic construct
  REGION 1..107: note = Description of Artificial Sequence: Synthetic polypeptide
  REGION 1..107: note = Synthetic Construct
DIQMTQSPSSLSASVGDRVTITCRASQSISSYLNWYQQKPGKAPKLLIYAASSLQSGVPSRFSGSGSGTDFTLTISSLQPEDFATYYCQQSDFPPWTFGGGTKVEIK

SEQ ID NO: 678 - protein, 122 aa, synthetic construct
  REGION 1..122: note = Description of Artificial Sequence: Synthetic polypeptide
  REGION 1..122: note = Synthetic Construct
EVQLLESGGGLVQPGGSLRLSCAASGFTFSSYAMSWVRQAPGKGLEWVSAISGSGGSTYYADSVKGRFTISRDNSKNTLYLQMNSLRAEDTAVYYCARTRSGYGASNYFDYWGQGTLVTVSS

SEQ ID NO: 679 - protein, 107 aa, synthetic construct
  REGION 1..107: note = Description of Artificial Sequence: Synthetic polypeptide
  REGION 1..107: note = Synthetic Construct
DIQMTQSPSSLSASVGDRVTITCRASQSISSYLNWYQQKPGKAPKLLIYAASSLQSGVPSRFSGSGSGTDFTLTISSLQPEDFATYYCQQGYSAPITFGGGTKVEIK

SEQ ID NO: 680 - protein, 122 aa, synthetic construct
  REGION 1..122: note = Description of Artificial Sequence: Synthetic polypeptide
  REGION 1..122: note = Synthetic Construct
QVQLVESGGGVVQPGRSLRLSCAASGFTFSTYGMHWVRQAPGKGLEWVAVIWYDGSNKYYADSVKGRFTISRDNSKNTLYLQMNSLRAEDTAVYYCARGTGAAAASPAFDIWGQGTMVTVSS

SEQ ID NO: 681 - protein, 106 aa, synthetic construct
  REGION 1..106: note = Description of Artificial Sequence: Synthetic polypeptide
  REGION 1..106: note = Synthetic Construct
EIVLTQSPATLSLSPGERATLSCRASQSVSSYLAWYQQKPGQAPRLLIYDASNRATGIPARFSGSGSGTDFTLTISSLEPEDFAVYYCQQLFDWPTFGGGTKVEIK

SEQ ID NO: 682 - protein, 119 aa, synthetic construct
  REGION 1..119: note = Description of Artificial Sequence: Synthetic polypeptide
  REGION 1..119: note = Synthetic Construct
EVQLLESGGGLVQPGGSLRLSCAASGFTFSSYAMSWVRQAPGKGLEWVSAISGSGGSTYYADSVKGRFTISRDNSKNTLYLQMNSLRAEDTAVYYCARVGQYMLGMDVWGQGTTVTVSS

SEQ ID NO: 683 - protein, 106 aa, synthetic construct
  REGION 1..106: note = Description of Artificial Sequence: Synthetic polypeptide
  REGION 1..106: note = Synthetic Construct
EIVLTQSPATLSLSPGERATLSCRASQSVSSYLAWYQQKPGQAPRLLIYDASNRATGIPARFSGSGSGTDFTLTISSLEPEDFAVYYCQQRAFLFTFGGGTKVEIK

SEQ ID NO: 684 - protein, 125 aa, synthetic construct
  REGION 1..125: note = Description of Artificial Sequence: Synthetic polypeptide
  REGION 1..125: note = Synthetic Construct
QVQLVESGGGVVQPGRSLRLSCAASGFTFSTYGMHWVRQAPGKGLEWVAVIWYDGSNKYYADSVKGRFTISRDNSKNTLYLQMNSLRAEDTAVYYCARGAPVDYGGIEPEYFQHWGQGTLVTVSS

SEQ ID NO: 685 - protein, 107 aa, synthetic construct
  REGION 1..107: note = Description of Artificial Sequence: Synthetic polypeptide
  REGION 1..107: note = Synthetic Construct
EIVLTQSPATLSLSPGERATLSCRASQSVSSYLAWYQQKPGQAPRLLIYDASNRATGIPARFSGSGSGTDFTLTISSLEPEDFAVYYCQQIDFLPYTFGGGTKVEIK

SEQ ID NO: 686 - protein, 119 aa, synthetic construct
  REGION 1..119: note = Description of Artificial Sequence: Synthetic polypeptide
  REGION 1..119: note = Synthetic Construct
EVQLLESGGGLVQPGGSLRLSCAASGFTFSSYAMSWVRQAPGKGLEWVSAISGSGGSTYYADSVKGRFTISRDNSKNTLYLQMNSLRAEDTAVYYCAKHYHVGIAFDIWGQGTMVTVSS

SEQ ID NO: 687 - protein, 107 aa, synthetic construct
  REGION 1..107: note = Description of Artificial Sequence: Synthetic polypeptide
  REGION 1..107: note = Synthetic Construct
DIQMTQSPSSLSASVGDRVTITCRASQSISSYLNWYQQKPGKAPKLLIYAASSLQSGVPSRFSGSGSGTDFTLTISSLQPEDFATYYCQQVYSPPITFGGGTKVEIK

SEQ ID NO: 688 - protein, 107 aa, synthetic construct
  REGION 1..107: note = Description of Artificial Sequence: Synthetic polypeptide
  REGION 1..107: note = Synthetic Construct
DIQMTQSPSSLSASVGDRVTITCRASQSISSYLNWYQQKPGKAPKLLIYAASSLQSGVPSRFSGSGSGTDFTLTISSLQPEDFATYYCQQGYAAPITFGGGTKVEIK

SEQ ID NO: 689 - protein, 120 aa, synthetic construct
  REGION 1..120: note = Description of Artificial Sequence: Synthetic polypeptide
  REGION 1..120: note = Synthetic Construct
EVQLLESGGGLVQPGGSLRLSCAASGFTFSTYAMSWVRQAPGKGLEWVSAISGSGGSTYYADSVKGRFTISRDNSKNTLYLQMNSLRAEDTAVYYCARAMARKSVAFDIWGQGTMVTVSS

SEQ ID NO: 690 - protein, 107 aa, synthetic construct
  REGION 1..107: note = Description of Artificial Sequence: Synthetic polypeptide
  REGION 1..107: note = Synthetic Construct
EIVLTQSPATLSLSPGERATLSCRASQSVSSYLAWYQQKPGQAPRLLIYDASNRATGIPARFSGSGSGTDFTLTISSLEPEDFTVYYCQQRYALPITFGGGTKVEIK

SEQ ID NO: 691 - protein, 121 aa, synthetic construct
  REGION 1..121: note = Description of Artificial Sequence: Synthetic polypeptide
  REGION 1..121: note = Synthetic Construct
EVQLLESGGGLVQPGGSLRLSCAASGFTFSSSAMSWVRQAPGKGLEWVSAISGSGGSTYYADSVKGRFTISRDNSKNTLYLQMNSLRAEDTAVYYCAKVPSYQRGTAFDPWGQGTLVTVSS

SEQ ID NO: 692 - protein, 108 aa, synthetic construct
  REGION 1..108: note = Description of Artificial Sequence: Synthetic polypeptide
  REGION 1..108: note = Synthetic Construct
EIVLTQSPGTLSLSPGERATLSCRASQSVSSSYLAWYQQKPGQAPRLLIYGASSRATGIPDRFSGSGSGTDFTLTISRLEPEDFAVYYCQQYASPPITFGGGTKVEIK

SEQ ID NO: 693 - protein, 121 aa, synthetic construct
  REGION 1..121: note = Description of Artificial Sequence: Synthetic polypeptide
  REGION 1..121: note = Synthetic Construct
EVQLLESGGGLVQPGGSLRLSCAASGFTFSSSAMSWVRQAPGKGLEWVSAISGSGGSTYYADSVKGRFTISRDNSKNTLYLQMNSLRAEDTAVYYCAKSPAVAGIYRADYWGQGTLVTVSS

SEQ ID NO: 694 - protein, 107 aa, synthetic construct
  REGION 1..107: note = Description of Artificial Sequence: Synthetic polypeptide
  REGION 1..107: note = Synthetic Construct
DIQMTQSPSSLSASVGDRVTITCRASQSISRYLNWYQQKPGKAPKLLIYAASSLQSGVPSRFSGSGSGTDFTLTISSLQPEDFATYYCQQVYSTPITFGGGTKVEIK

SEQ ID NO: 695 - protein, 106 aa, synthetic construct
  REGION 1..106: note = Description of Artificial Sequence: Synthetic polypeptide
  REGION 1..106: note = Synthetic Construct
EIVMTQSPATLSLSPGERATLSCRASQSVSSYLAWYQQKPGQAPRLLIYDSSNRATGIPARFSGSGSGTDFTLTISSLEPEDFAVYYCQQLVHWPTFGGGTKVEIK

SEQ ID NO: 696 - protein, 124 aa, synthetic construct
  REGION 1..124: note = Description of Artificial Sequence: Synthetic polypeptide
  REGION 1..124: note = Synthetic Construct
QVQLVQSGAEVKKPGASVKVSCKASGYTFTSYYMHWVRQAPGQGLEWMGIINPSGGSTSYAQKFQGRVTMTRDTSTSTVYMELSSLRSEDTAVYYCARGPGYTTALDYYYMDVWGKGTTVTVSS

SEQ ID NO: 697 - protein, 106 aa, synthetic construct
  REGION 1..106: note = Description of Artificial Sequence: Synthetic polypeptide
  REGION 1..106: note = Synthetic Construct
EIVMTQSPATLSVSPGERATLSCRASQSVSSNLAWYQQKPGQAPRLLIYGASTRATGIPARFSGSGSGTEFTLTISSLQSEDFAVYYCQQLDDWFTFGGGTKVEIK

SEQ ID NO: 698 - protein, 116 aa, synthetic construct
  REGION 1..116: note = Description of Artificial Sequence: Synthetic polypeptide
  REGION 1..116: note = Synthetic Construct
QVQLVQSGAEVKKPGASVKVSCKASGYTFTSYYMHWVRQAPGQGLEWMGIINPSGGSTSYAQKFQGRVTMTRDTSTSTVYMELSSLRSEDTAVYYCARPAKTADYWGQGTLVTVSS

SEQ ID NO: 699 - protein, 107 aa, synthetic construct
  REGION 1..107: note = Description of Artificial Sequence: Synthetic polypeptide
  REGION 1..107: note = Synthetic Construct
EIVLTQSPATLSLSPGERATLSCRASQSVSSYLAWYQQKPGQAPRLLIYDSSNRATGIPARFSGSGSGTDFTLTISSLEPEDFAVYYCQQRSNYPITFGGGTKVEIK

SEQ ID NO: 700 - protein, 116 aa, synthetic construct
  REGION 1..116: note = Description of Artificial Sequence: Synthetic polypeptide
  REGION 1..116: note = Synthetic Construct
QVQLVQSGAEVKKPGASVKVSCKASGYTFTSYYMHWVRQAPGQGLEWMGIINPSGGSTTYAQKFQGRVTMTRDTSTSTVYMELSSLRSEDTAVYYCARPGKSMDVWGQGTTVTVSS

SEQ ID NO: 701 - protein, 107 aa, synthetic construct
  REGION 1..107: note = Description of Artificial Sequence: Synthetic polypeptide
  REGION 1..107: note = Synthetic Construct
EIVLTQSPGTLSLSPGERATLSCRASQSVSSYLAWYQQKPGQAPRLLIYDASNRATGIPARFSGSGSGTDFTLTISSLEPEDFAVYYCQQRILYPITFGGGTKVEIK

SEQ ID NO: 702 - protein, 107 aa, synthetic construct
  REGION 1..107: note = Description of Artificial Sequence: Synthetic polypeptide
  REGION 1..107: note = Synthetic Construct
EIVLTQSPATLSLSPGERATLSCRASQSVSSYLAWYQQKPGQAPRLLIYDASNRATGIPARFSGSGSGTDFTLTISSLEPEDFAVYYCQQRAAYPITFGGGTKVEIK

SEQ ID NO: 703 - protein, 107 aa, synthetic construct
  REGION 1..107: note = Description of Artificial Sequence: Synthetic polypeptide
  REGION 1..107: note = Synthetic Construct
EIVLTQSPATLSLSPGERATLSCRASQSVSSYLAWYQQKPGQAPRLLIYDASKRATGIPARFSGSGSGTDFTLTISSLEPEDFAVYYCQQRTSHPITFGGGTKVEIK

SEQ ID NO: 704 - protein, 108 aa, synthetic construct
  REGION 1..108: note = Description of Artificial Sequence: Synthetic polypeptide
  REGION 1..108: note = Synthetic Construct
EIVLTQSPGTLSLSPGERATLSCRASQSVSSSYLAWYQQKPGQAPRLLIYGASSRATGIPDRFSGSGSGTDFTLTISRLEPEDFAVYYCQQYAGSPFTFGGGTKVEIK

SEQ ID NO: 705 - protein, 121 aa, synthetic construct
  REGION 1..121: note = Description of Artificial Sequence: Synthetic polypeptide
  REGION 1..121: note = Synthetic Construct
QVQLVQSGAEVKKPGASVKVSCKASGYTFTSYYMHWVRQAPGQGLEWMGIINPSGGSTSYAQKFQGRVTMTRDTSTSTVYMELSSLRSEDTAVYYCARGVGGQDYYYMDVWGKGTTVTVSS

SEQ ID NO: 706 - protein, 106 aa, synthetic construct
  REGION 1..106: note = Description of Artificial Sequence: Synthetic polypeptide
  REGION 1..106: note = Synthetic Construct
DIQMTQSPSSLSASVGDRVTITCRASQSISSYLNWYQQKPGKAPKLLIYAASSLQSGVPSRFSGSGSGTDFTLTISSLQPEDFATYYCQQFDDVFTFGGGTKVEIK

SEQ ID NO: 707 - protein, 108 aa, synthetic construct
  REGION 1..108: note = Description of Artificial Sequence: Synthetic polypeptide
  REGION 1..108: note = Synthetic Construct
EIVLTQSPGTLSLSPGERATLSCRASQSVSSSYLAWYQQKPGQAPRLLIYGASSRATGIPDRFSGSGSGTDFTLTISRLEPEDFAVYYCQQYVNSPFTFGGGTKVEIK

SEQ ID NO: 708 - protein, 107 aa, synthetic construct
  REGION 1..107: note = Description of Artificial Sequence: Synthetic polypeptide
  REGION 1..107: note = Synthetic Construct
DIQMTQSPSSLSASVGDRVTITCRASQSINSYLNWYQQKPGKAPKLLIYAASSLQSGVPSRFSGSGSGTDFTLTISSLQPEDFATYYCQQSDDDPFTFGGGTKVEIK

SEQ ID NO: 709 - protein, 120 aa, synthetic construct
  REGION 1..120: note = Description of Artificial Sequence: Synthetic polypeptide
  REGION 1..120: note = Synthetic Construct
QVQLVQSGAEVKKPGASVKVSCKASGYTFTGSYMHWVRQAPGQGLEWMGWINPNSGGTNYAQKFQGRVTMTRDTSISTAYMELSRLRSDDTAVYYCARGPLYHPMIFDYWGQGTLVTVSS

SEQ ID NO: 710 - protein, 107 aa, synthetic construct
  REGION 1..107: note = Description of Artificial Sequence: Synthetic polypeptide
  REGION 1..107: note = Synthetic Construct
EIVLTQSPATLSLSPGERATLSCRASQSVSSYLAWYQQKPGQAPRLLIYDASNRATGIPARFSGSGSGTDFTLTISSLEPEDFAVYYCQQLSTYPLTFGGGTKVEIK

SEQ ID NO: 711 - protein, 115 aa, synthetic construct
  REGION 1..115: note = Description of Artificial Sequence: Synthetic polypeptide
  REGION 1..115: note = Synthetic Construct
QVQLVQSGAEVKKPGASVKVSCKASGYTFTGYYMHWVRQAPGQGLEWMGSINPNSGGTNYAQKFQGRVTMTRDTSISTAYMELSRLRSDDTAVYYCARASSVDNWGQGTLVTVSS

SEQ ID NO: 712 - protein, 107 aa, synthetic construct
  REGION 1..107: note = Description of Artificial Sequence: Synthetic polypeptide
  REGION 1..107: note = Synthetic Construct
EIVMTQSPATLSLSPGERATLSCRASQSVSSYLAWYQQKPGQAPRLLIYDASNRATGIPARFSGSGSGTDFTLTISSLEPEDFAVYYCQQRSVYPITFGGGTKVEIK

SEQ ID NO: 713 - protein, 126 aa, synthetic construct
  REGION 1..126: note = Description of Artificial Sequence: Synthetic polypeptide
  REGION 1..126: note = Synthetic Construct
QVQLVQSGAEVKKPGASVKVSCKASGYTFTNYGISWVRQAPGQGLEWMGWISAYNGNTNYAQKLQGRVTMTTDTSTSTAYMELRSLRSDDTAVYYCARGPTKAYYGSGSYVVFDPWGQGTLVTVSS

SEQ ID NO: 714 - protein, 107 aa, synthetic construct
  REGION 1..107: note = Description of Artificial Sequence: Synthetic polypeptide
  REGION 1..107: note = Synthetic Construct
EIVLTQSPATLSLSPGERATLSCRASQSVSSYLAWYQQKPGQAPRLLIYDASKRATGIPARFSGSGSGTDFTLTISSLEPEDFAVYYCQQVSLFPLTFGGGTKVEIK

SEQ ID NO: 715 - protein, 122 aa, synthetic construct
  REGION 1..122: note = Description of Artificial Sequence: Synthetic polypeptide
  REGION 1..122: note = Synthetic Construct
EVQLVQSGAEVKKPGESLKISCKGSGYSFTSYWIGWVRQMPGKGLEWMGIIYPGDSDTRYSPSFQGQVTISADKSISTAYLQWSSLKASDTAMYYCARLGIYSTGATAFDIWGQGTMVTVSS

SEQ ID NO: 716 - protein, 108 aa, synthetic construct
  REGION 1..108: note = Description of Artificial Sequence: Synthetic polypeptide
  REGION 1..108: note = Synthetic Construct
DIQMTQSPSTLSASVGDRVTITCRASQSISSWLAWYQQKPGKAPKLLIYDASSLESGVPSRFSGSGSGTEFTLTISSLQPDDFATYYCLDYNSYSPITFGGGTKVEIK

SEQ ID NO: 717 - protein, 119 aa, synthetic construct
  REGION 1..119: note = Description of Artificial Sequence: Synthetic polypeptide
  REGION 1..119: note = Synthetic Construct
QVQLVQSGAEVKKPGASVKVSCKASGYTFTGSYMHWVRQAPGQGLEWMGWINPNSGGTNYAQKFQGRVTMTRDTSISTAYMELSRLRSDDTAVYYCARGGVWYSLFDIWGQGTMVTVSS

SEQ ID NO: 718 - protein, 107 aa, synthetic construct
  REGION 1..107: note = Description of Artificial Sequence: Synthetic polypeptide
  REGION 1..107: note = Synthetic Construct
DIQMTQSPSSLSASVGDRVTITCQASQDISNYLNWYQQKPGKAPKLLIYDASNLETGVPSRFSGSGSGTDFTFTISSLQPEDIATYYCQQHIALPFTFGGGTKVEIK

SEQ ID NO: 719 - protein, 116 aa, synthetic construct
  REGION 1..116: note = Description of Artificial Sequence: Synthetic polypeptide
  REGION 1..116: note = Synthetic Construct
QVQLVQSGAEVKKPGASVKVSCKASGYTFTGYYMHWVRQAPGQGLEWMGWINPNSGGTSYAQKFQGRVTMTRDTSISTAYMELSRLRSDDTAVYYCARASKMGDDWGQGTLVTVSS

SEQ ID NO: 720 - protein, 107 aa, synthetic construct
  REGION 1..107: note = Description of Artificial Sequence: Synthetic polypeptide
  REGION 1..107: note = Synthetic Construct
EIVLTQSPATLSLSPGERATLSCRASQSVSSYLAWYQQKPGQAPRLLIYDASKRATGIPARFSGSGSGTDFTLTISSLEPEDFAVYYCQQRASMPITFGGGTKVEIK

SEQ ID NO: 721 - protein, 120 aa, synthetic construct
  REGION 1..120: note = Description of Artificial Sequence: Synthetic polypeptide
  REGION 1..120: note = Synthetic Construct
QVQLVQSGAEVKKPGASVKVSCKASGYTFTSYGIHWVRQAPGQGLEWMGWISAYNGNTNYAQKLQGRVTMTTDTSTSTAYMELRSLRSDDTAVYYCARGGVPRVSYFQHWGQGTLVTVSS

SEQ ID NO: 722 - protein, 107 aa, synthetic construct
  REGION 1..107: note = Description of Artificial Sequence: Synthetic polypeptide
  REGION 1..107: note = Synthetic Construct
EIVLTQSPATLSLSPGERATLSCRASQSVSSYLAWYQQKPGQAPRLLIYDSSNRATGIPARFSGSGSGTDFTLTISSLEPEDFAVYYCQQAFNRPPTFGGGTKVEIK

SEQ ID NO: 723 - protein, 123 aa, synthetic construct
  REGION 1..123: note = Description of Artificial Sequence: Synthetic polypeptide
  REGION 1..123: note = Synthetic Construct
EVQLVQSGAEVKKPGESLKISCKGSGYSFTSYWIGWVRQMPGKGLEWMGIIYPGDSDTRYSPSFQGQVTISADKSISTAYLQWSSLKASDTAMYYCARAGHYDDWSGLGLDVWGQGTMVTVSS

SEQ ID NO: 724 - protein, 107 aa, synthetic construct
  REGION 1..107: note = Description of Artificial Sequence: Synthetic polypeptide
  REGION 1..107: note = Synthetic Construct
EIVLTQSPATLSLSPGERATLSCRASQSVSSYLAWYQQKPGQAPRLLIYDASKRATGIPARFSGSGSGTDFTLTISSLEPEDFAVYYCQQSSVHPYTFGGGTKVEIK

SEQ ID NO: 725 - protein, 120 aa, synthetic construct
  REGION 1..120: note = Description of Artificial Sequence: Synthetic polypeptide
  REGION 1..120: note = Synthetic Construct
QVQLVQSGAEVKKPGASVKVSCKASGYTFTSYGISWVRQAPGQGLEWMGWISTYNGNTNYAQKLQGRVTMTTDTSTSTAYMELRSLRSDDTAVYYCARGSGSGYDSWYDWGQGTLVTVSS

SEQ ID NO: 726 - protein, 107 aa, synthetic construct
  REGION 1..107: note = Description of Artificial Sequence: Synthetic polypeptide
  REGION 1..107: note = Synthetic Construct
DIQMTQSPSSVSASVGDRVTITCRASQGIDSWLAWYQQKPGKAPKLLIYAASSLQSGVPSRFSGSGSGTDFTLTISSLQPEDFATYYCQQAYSLPPTFGGGTKVEIK

SEQ ID NO: 727 - protein, 122 aa, synthetic construct
  REGION 1..122: note = Description of Artificial Sequence: Synthetic polypeptide
  REGION 1..122: note = Synthetic Construct
EVQLVQSGAEVKKPGESLKISCKGSGYSFTSYWIGWVRQMPGKGLEWMGIIYPGDSDTRYSPSFQGQVTISADKSISTAYLQWSSLKASDTAMYYCARLGRWSSGSTAFDIWGQGTMVTVSS

SEQ ID NO: 728 - protein, 106 aa, synthetic construct
  REGION 1..106: note = Description of Artificial Sequence: Synthetic polypeptide
  REGION 1..106: note = Synthetic Construct
EIVMTQSPATLSVSPGERATLSCRASQSVSSNLAWYQQKPGQAPRLLIYGASTRATGIPARFSGSGSGTEFTLTISSLQSEDFAVYYCQQDDDGYTFGGGTKVEIK

SEQ ID NO: 729 - protein, 122 aa, synthetic construct
  REGION 1..122: note = Description of Artificial Sequence: Synthetic polypeptide
  REGION 1..122: note = Synthetic Construct
EVQLVQSGAEVKKPGESLKISCKGSGYSFTSYWIGWVRQMPGKGLEWMGIIYPGDSDTRYSPSFQGQVTISADKSISTAYLQWSSLKASDTAMYYCARLGRKPSGSVAFDIWGQGTMVTVSS

SEQ ID NO: 730 - protein, 107 aa, synthetic construct
  REGION 1..107: note = Description of Artificial Sequence: Synthetic polypeptide
  REGION 1..107: note = Synthetic Construct
EIVLTQSPATLSLSPGERATLSCRASQSVSSYLAWYQQKPGQAPRLLIYDASNRATGIPARFSGSGSGTDFTLTISSLEPEDFAVYYCQQDYSWPYTFGGGTKVEIK

SEQ ID NO: 731 - protein, 117 aa, synthetic construct
  REGION 1..117: note = Description of Artificial Sequence: Synthetic polypeptide
  REGION 1..117: note = Synthetic Construct
QVQLVQSGAEVKKPGASVKVSCKASGYTFTGSYMHWVRQAPGQGLEWMGWINPNSGGTNYAQKFQGRVTMTRDTSISTAYMELSRLRSDDTAVYYCARAGHKTHDYWGQGTLVTVSS

SEQ ID NO: 732 - protein, 107 aa, synthetic construct
  REGION 1..107: note = Description of Artificial Sequence: Synthetic polypeptide
  REGION 1..107: note = Synthetic Construct
EIVLTQSPGTLSLSPGERATLSCRASQSVSSYLAWYQQKPGQAPRLLIYDASNRATGIPARFSGSGSGTDFTLTISSLEPEDFAVYYCQQRSAYPITFGGGTKVEIK

SEQ ID NO: 733 - protein, 107 aa, synthetic construct
  REGION 1..107: note = Description of Artificial Sequence: Synthetic polypeptide
  REGION 1..107: note = Synthetic Construct
EIVLTQSPATLSLSPGERATLSCRASQSVSSYLAWYQQKPGQAPRLLIYDASNRATGIPARFSGSGSGTDFTLTISSLEPEDFAVYYCQQRSHFPITFGGGTKVEIK

SEQ ID NO: 734 - protein, 116 aa, synthetic construct
  REGION 1..116: note = Description of Artificial Sequence: Synthetic polypeptide
  REGION 1..116: note = Synthetic Construct
QVQLVESGGGVVQPGRSLRLSCAASGFTFSSYGMHWVRQAPGKGLEWVALIWYDGSNKYYADSVKGRFTISRDNSKNTLYLQMNSLRAEDTAVYYCAKPGSMTDYWGQGTLVTVSS

SEQ ID NO: 735 - protein, 107 aa, synthetic construct
  REGION 1..107: note = Description of Artificial Sequence: Synthetic polypeptide
  REGION 1..107: note = Synthetic Construct
EIVLTQSPATLSLSPGERATLSCRASQSVSSYLAWYQQKPGQAPRLLIYDASNRATGIPARFSGSGSGTDFTLTISSLEPEDFAVYYCQQRANYPITFGGGTKVEIK

SEQ ID NO: 736 - protein, 117 aa, synthetic construct
  REGION 1..117: note = Description of Artificial Sequence: Synthetic polypeptide
  REGION 1..117: note = Synthetic Construct
QVQLVQSGAEVKKPGASVKVSCKASGYTFTGSYMHWVRQAPGQGLEWMGWINPNSGGTNYAQKFQGRVTMTRDTSISTAYMELSRLRSDDTAVYYCARAKSVDHDYWGQGTLVTVSS

SEQ ID NO: 737 - protein, 107 aa, synthetic construct
  REGION 1..107: note = Description of Artificial Sequence: Synthetic polypeptide
  REGION 1..107: note = Synthetic Construct
EIVLTQSPATLSLSPGERATLSCRASQSVSSYLAWYQQKPGQAPRLLIYDASNRATGIPARFSGSGSGTDFTLTISSLEPEDFAVYYCQQRADYPITFGGGTKVEIK

SEQ ID NO: 738 - protein, 107 aa, synthetic construct
  REGION 1..107: note = Description of Artificial Sequence: Synthetic polypeptide
  REGION 1..107: note = Synthetic Construct
EIVLTQSPATLSLSPGERATLSCRASQSVSSYLAWYQQKPGQAPRLLIYDASNRATGIPARFSGSGSGTDFTLTISSLEPEDFAVYYCQQRSVYPITFGGGTKVEIK

SEQ ID NO: 739 - protein, 122 aa, synthetic construct
  REGION 1..122: note = Description of Artificial Sequence: Synthetic polypeptide
  REGION 1..122: note = Synthetic Construct
QVQLVQSGAEVKKPGASVKVSCKASGYTFTSYYMHWVRQAPGQGLEWMGIINPSGGSTSYAQKFQGRVTMTRDTSTSTVYMELSSLRSEDTAVYYCARDISTHDYDLAFDIWGQGTMVTVSS

SEQ ID NO: 740 - protein, 108 aa, synthetic construct
  REGION 1..108: note = Description of Artificial Sequence: Synthetic polypeptide
  REGION 1..108: note = Synthetic Construct
EIVMTQSPGTLSLSPGERATLSCRASQSVSSSYLAWYQQKPGQAPRLLIYGASNRATGIPDRFSGSGSGTDFTLTISRLEPEDFAVYYCQQAGSHPFTFGGGTKVEIK

SEQ ID NO: 741 - protein, 117 aa, synthetic construct
  REGION 1..117: note = Description of Artificial Sequence: Synthetic polypeptide
  REGION 1..117: note = Synthetic Construct
QVQLQESGPGLVKPSETLSLTCTVSGGSISSYYWSWIRQPPGKGLEWIGSIYYSGSTNYNPSLKSRVTISVDTSKNQFSLKLSSVTAADTAVYYCARSGTETLFDYWGQGTLVTVSS

SEQ ID NO: 742 - protein, 107 aa, synthetic construct
  REGION 1..107: note = Description of Artificial Sequence: Synthetic polypeptide
  REGION 1..107: note = Synthetic Construct
DIQMTQSPSSLSASVGDRVTITCQASQDITNYLNWYQQKPGKAPKLLIYDASNLETGVPSRFSGSRSGTDFTFTISSLQPEDIATYYCQQDVNYPPTFGGGTKVEIK

SEQ ID NO: 743 - protein, 121 aa, synthetic construct
  REGION 1..121: note = Description of Artificial Sequence: Synthetic polypeptide
  REGION 1..121: note = Synthetic Construct
EVQLVQSGAEVKKPGESLKISCKGSGYSFTSYWIGWVRQMPGKGLEWMGIIYPGDSDTTYSPSFQGQVTISADKSISTAYLQWSSLKASDTAMYYCARAKMLDDGYAFDIWGQGTMVTVSS

SEQ ID NO: 744 - protein, 107 aa, synthetic construct
  REGION 1..107: note = Description of Artificial Sequence: Synthetic polypeptide
  REGION 1..107: note = Synthetic Construct
EIVMTQSPATLSVSPGERATLSCRASQSVSSNLAWYQQKPGQAPRLLIYGASTRATGIPARFSGSGSGTEFTLTISSLQSEDFAVYYCQQDDNYPYTFGGGTKVEIK

SEQ ID NO: 745 - protein, 107 aa, synthetic construct
  REGION 1..107: note = Description of Artificial Sequence: Synthetic polypeptide
  REGION 1..107: note = Synthetic Construct
EIVLTQSPATLSLSPGERATLSCRASQSVSSYLAWYQQKPGQAPRLLIYDASNRATGIPARFSGSGSGTDFTLTISSLEPEDFAVYYCQQRSTFPITFGGGTKVEIK

SEQ ID NO: 746 - protein, 121 aa, synthetic construct
  REGION 1..121: note = Description of Artificial Sequence: Synthetic polypeptide
  REGION 1..121: note = Synthetic Construct
QVQLVQSGAEVKKPGASVKVSCKASGYTFTGYYMHWVRQAPGQGLEWMGWINPNSGGTNYAQKFQGRVTMTRDTSISTAYMELSRLRSDDTAVYYCARDLGYSSLLALDIWGQGTMVTVSS

SEQ ID NO: 747 - protein, 107 aa, synthetic construct
  REGION 1..107: note = Description of Artificial Sequence: Synthetic polypeptide
  REGION 1..107: note = Synthetic Construct
EIVLTQSPATLSLSPGERATLSCRASQSVSSYLAWYQQKPGQAPRLLIYDASNRATGIPARFSGSGSGTDFTLTISSLEPEDFAVYYCQQVSNYPFTFGGGTKVEIK

SEQ ID NO: 748 - protein, 122 aa, synthetic construct
  REGION 1..122: note = Description of Artificial Sequence: Synthetic polypeptide
  REGION 1..122: note = Synthetic Construct
EVQLVESGGGLVKPGGSLRLSCAASGFTFSSYSMNWVRQAPGKGLEWVSSISSSSSYIYYADSVKGRFTISRDNAKNSLYLQMNSLRAEDTAVYYCARGGGRRGDNNWFDPWGQGTLVTVSS

SEQ ID NO: 749 - protein, 113 aa, synthetic construct
  REGION 1..113: note = Description of Artificial Sequence: Synthetic polypeptide
  REGION 1..113: note = Synthetic Construct
DIVMTQSPDSLAVSLGERATINCKSSQSVLYSSNNKNYLAWYQQKPGQPPKLLIYWASTRESGVPDRFSGSGSGTDFTLTISSLQAEDVAVYYCQQYHDAPITFGGGTKVEIK

SEQ ID NO: 750 - protein, 117 aa, synthetic construct
  REGION 1..117: note = Description of Artificial Sequence: Synthetic polypeptide
  REGION 1..117: note = Synthetic Construct
QVQLVESGGGVVQPGRSLRLSCAASGFTFSSYGMHWVRQAPGKGLEWVAVISYDGSNKYYADSVKGRFTISRDNSKNTLYLQMNSLRAEDTAVYYCARGPPHEMDYWGQGTLVTVSS

SEQ ID NO: 751 - protein, 113 aa, synthetic construct
  REGION 1..113: note = Description of Artificial Sequence: Synthetic polypeptide
  REGION 1..113: note = Synthetic Construct
DIVMTQSPDSLAVSLGERATINCKSSQSVLYSSNNKNYLAWYQQKPGQPPKLLIYWASTRESGVPDRFSGSGSGTDFTLTISSLQAEDVAVYYCQQAYVVPPTFGGGTKVEIK

SEQ ID NO: 752 - protein, 119 aa, synthetic construct
  REGION 1..119: note = Description of Artificial Sequence: Synthetic polypeptide
  REGION 1..119: note = Synthetic Construct
QVQLVESGGGVVQPGRSLRLSCAASGFTFSSYGMHWVRQAPGKGLEWVAVIWYDGSNKYYADSVKGRFTISRDNSKNTLYLQMNSLRAEDTAVYYCARTPYPWIYFDLWGRGTLVTVSS

SEQ ID NO: 753 - protein, 107 aa, synthetic construct
  REGION 1..107: note = Description of Artificial Sequence: Synthetic polypeptide
  REGION 1..107: note = Synthetic Construct
EIVLTQSPATLSLSPGERATLSCRASQSVSSYLAWYQQKPGQAPRLLIYDASNRATGIPARFSGSGSGTDFTLTISSLEPEDFAVYYCQQADNWPFTFGGGTKVEIK

SEQ ID NO: 754 - protein, 120 aa, synthetic construct
  REGION 1..120: note = Description of Artificial Sequence: Synthetic polypeptide
  REGION 1..120: note = Synthetic Construct
EVQLVESGGGLVQPGGSLRLSCAASGFTFSSYSMNWVRQAPGKGLEWVSYISGSSSTIYYADSVKGRFTISRDNAKNSLYLQMNSLRAEDTAVYYCARGGRRHYGGMDVWGQGTTVTVSS

SEQ ID NO: 755 - protein, 112 aa, synthetic construct
  REGION 1..112: note = Description of Artificial Sequence: Synthetic polypeptide
  REGION 1..112: note = Synthetic Construct
DIVMTQSPLSLPVTPGEPASISCRSSQSLLHSNGYNYLDWYLQKPGQSPQLLIYLGSHRASGVPDRFSGSGSGTDFTLKISRVEAEDVGVYYCMQALESPRTFGGGTKVEIK

SEQ ID NO: 756 - protein, 122 aa, synthetic construct
  REGION 1..122: note = Description of Artificial Sequence: Synthetic polypeptide
  REGION 1..122: note = Synthetic Construct
QVQLVQSGAEVKKPGSSVKVSCKASGGTFSSYAISWVRQAPGQGLEWMGGIIPIFGTANYAQKFQGRVTITADESTSTAYMELSSLRSEDTAVYYCARGGGTFWSGSWALYWGQGTLVTVSS

SEQ ID NO: 757 - protein, 107 aa, synthetic construct
  REGION 1..107: note = Description of Artificial Sequence: Synthetic polypeptide
  REGION 1..107: note = Synthetic Construct
EIVLTQSPATLSLSPGERATLSCRASQSVSSYLAWYQQKPGQAPRLLIYDASNRATGIPARFSGSGSGTDFTLTISSLEPEDFAVYYCQQYVNWPFTFGGGTKVEIK

SEQ ID NO: 758 - protein, 123 aa, synthetic construct
  REGION 1..123: note = Description of Artificial Sequence: Synthetic polypeptide
  REGION 1..123: note = Synthetic Construct
QVQLVQSGAEVKKPGSSVKVSCKASGGTFSSYAISWVRQAPGQGLEWMGGIIPIFGTANYAQKFQGRVTITADESTSTAYMELSSLRSEDTAVYYCARDSGNYDYWSGALRYWGQGTLVTVSS

SEQ ID NO: 759 - protein, 107 aa, synthetic construct
  REGION 1..107: note = Description of Artificial Sequence: Synthetic polypeptide
  REGION 1..107: note = Synthetic Construct
EIVLTQSPATLSLSPGERATLSCRASQSVSSYLAWYQQKPGQAPRLLIYDASNRATGIPARFSGSGSGTDFTLTISSLEPEDFAVYYCQQSSNWPWTFGGGTKVEIK

SEQ ID NO: 760 - protein, 118 aa, synthetic construct
  REGION 1..118: note = Description of Artificial Sequence: Synthetic polypeptide
  REGION 1..118: note = Synthetic Construct
QVQLQESGPGLVKPSQTLSLTCTVSGGSISSGGYYWSWIRQHPGKGLEWIGYIYYSGSTVYNPSLKSRVTISVDTSKNQFSLKLSSVTAADTAVYYCARVSSSWYKAWGQGTMVTVSS

SEQ ID NO: 761 - protein, 107 aa, synthetic construct
  REGION 1..107: note = Description of Artificial Sequence: Synthetic polypeptide
  REGION 1..107: note = Synthetic Construct
DIQMTQSPSSVSASVGDRVTITCRASQGISSWLAWYQQKPGKAPKLLIYAASSLQSGVPSRFSGSGSGTDFTLTISSLQPEDFATYYCQQASTFPITFGGGTKVEIK

SEQ ID NO: 762 - protein, 123 aa, synthetic construct
  REGION 1..123: note = Description of Artificial Sequence: Synthetic polypeptide
  REGION 1..123: note = Synthetic Construct
QVQLQQWGAGLLKPSETLSLTCAVYGGSFSGYYWSWIRQPPGKGLEWIGEIDHSGSTKYNPSLKSRVTISVDTSKNQFSLKLSSVTAADTAVYYCARVGVVVGRPGYSAFDIWGQGTMVTVSS

SEQ ID NO: 763 - protein, 107 aa, synthetic construct
  REGION 1..107: note = Description of Artificial Sequence: Synthetic polypeptide
  REGION 1..107: note = Synthetic Construct
DIQMTQSPSSVSASVGDRVTITCRASQGISSWLAWYQQKPGKAPKLLIYAASSLQSGVPSRFSGSGSGTDFTLTISSLQPEDFATYYCQQRNSLPLTFGGGTKVEIK

SEQ ID NO: 764 - protein, 107 aa, synthetic construct
  REGION 1..107: note = Description of Artificial Sequence: Synthetic polypeptide
  REGION 1..107: note = Synthetic Construct
DIQMTQSPSSLSASVGDRVTITCRASQSISSYLNWYQQKPGKAPKLLIYAASSLQSGVPSRFSGSGSGTDFTLTISSLQPEDFATYYCQQSYDFPITFGGGTKVEIK

SEQ ID NO: 765 - protein, 124 aa, synthetic construct
  REGION 1..124: note = Description of Artificial Sequence: Synthetic polypeptide
  REGION 1..124: note = Synthetic Construct
QVQLVESGGGVVQPGRSLRLSCAASGFTFSSYGMHWVRQAPGKGLEWVAVIWYDGSNKYYADSVKGRFTISRDNSKNTLYLQMNSLRAEDTAVYYCAKDLGGYYGGAAYGMDVWGQGTTVTVSS

SEQ ID NO: 766 - protein, 108 aa, synthetic construct
  REGION 1..108: note = Description of Artificial Sequence: Synthetic polypeptide
  REGION 1..108: note = Synthetic Construct
DIQLTQSPSSVSASVGDRVTITCRASQDISSWLAWYQQKPGKAPKLLIYAASSLQSGVPSRFSGSGSGTDFTLTISSLQPEDFATYYCQQEVDYPPLTFGGGTKVEIK

SEQ ID NO: 767 - protein, 122 aa, synthetic construct
  REGION 1..122: note = Description of Artificial Sequence: Synthetic polypeptide
  REGION 1..122: note = Synthetic Construct
QVQLVESGGGVVQPGRSLRLSCAASGFTFSSYGMHWVRQAPGKGLEWVAVISYDGSNKYYADSVKGRFTISRDNSKNTLYLQMNSLRAEDTAVYYCAKDGVYYGLGNWFDPWGQGTLVTVSS

SEQ ID NO: 768 - protein, 107 aa, synthetic construct
  REGION 1..107: note = Description of Artificial Sequence: Synthetic polypeptide
  REGION 1..107: note = Synthetic Construct
DIQMTQSPSTLSASVGDRVTITCRASQSISSWLAWYQQKPGKAPKLLIYKASSLESGVPSRFSGSGSGTEFTLTISSLQPDDFATYYCQQLNSYSPTFGGGTKVEIK

SEQ ID NO: 769 - protein, 119 aa, synthetic construct
  REGION 1..119: note = Description of Artificial Sequence: Synthetic polypeptide
  REGION 1..119: note = Synthetic Construct
QVQLQESGPGLVKPSETLSLTCTVSGGSISSYYWSWIRQPPGKGLEWIGSIYYSGSTNYNPSLKSRVTISVDTSKNQFSLKLSSVTAADTAVYYCARHGWDRVGWFDPWGQGTLVTVSS

SEQ ID NO: 770 - protein, 107 aa, synthetic construct
  REGION 1..107: note = Description of Artificial Sequence: Synthetic polypeptide
  REGION 1..107: note = Synthetic Construct
EIVLTQSPATLSLSPGERATLSCRASQSVSRYLAWYQQKPGQAPRLLIYDASNRATGIPARFSGSGSGTDFTLTISSLEPEDFAVYYCQQYIFWPPTFGGGTKVEIK

SEQ ID NO: 771 - protein, 110 aa, synthetic construct; identical to SEQ ID NO: 207
  REGION 1..110: note = Description of Artificial Sequence: Synthetic polypeptide
  REGION 1..110: note = Synthetic Construct

SEQ ID NO: 772 - protein, 9 aa, synthetic construct
  REGION 1..9: note = Description of Artificial Sequence: Synthetic peptide
  REGION 1..9: note = Synthetic Construct
YTFTSYYIH

SEQ ID NO: 773 - protein, 17 aa, synthetic construct
  REGION 1..17: note = Description of Artificial Sequence: Synthetic peptide
  REGION 1..17: note = Synthetic Construct
IINPSGGSTSYAQKFQG

SEQ ID NO: 774 - protein, 16 aa, synthetic construct
  REGION 1..16: note = Description of Artificial Sequence: Synthetic peptide
  REGION 1..16: note = Synthetic Construct
AREADDSSGYPLGLDV

SEQ ID NO: 775 - protein, 11 aa, synthetic construct
  REGION 1..11: note = Description of Artificial Sequence: Synthetic peptide
  REGION 1..11: note = Synthetic Construct
RASQSVSSNLA

SEQ ID NO: 776 - protein, 7 aa, synthetic construct
  REGION 1..7: note = Description of Artificial Sequence: Synthetic peptide
  REGION 1..7: note = Synthetic Construct
GASTRAT

SEQ ID NO: 777 - protein, 9 aa, synthetic construct
  REGION 1..9: note = Description of Artificial Sequence: Synthetic peptide
  REGION 1..9: note = Synthetic Construct
QQVNSLPPT

SEQ ID NO: 778 - protein, 9 aa, synthetic construct
  REGION 1..9: note = Description of Artificial Sequence: Synthetic peptide
  REGION 1..9: note = Synthetic Construct
YSFTTYWIG

SEQ ID NO: 779 - protein, 17 aa, synthetic construct
  REGION 1..17: note = Description of Artificial Sequence: Synthetic peptide
  REGION 1..17: note = Synthetic Construct
IIYPGDSDTRYSPSFQG

SEQ ID NO: 780 - protein, 15 aa, synthetic construct
  REGION 1..15: note = Description of Artificial Sequence: Synthetic peptide
  REGION 1..15: note = Synthetic Construct
ARAGHYDGGHLGMDV

SEQ ID NO: 781 - protein, 12 aa, synthetic construct
  REGION 1..12: note = Description of Artificial Sequence: Synthetic peptide
  REGION 1..12: note = Synthetic Construct
RASQSVSSSYLA

SEQ ID NO: 782 - protein, 7 aa, synthetic construct
  REGION 1..7: note = Description of Artificial Sequence: Synthetic peptide
  REGION 1..7: note = Synthetic Construct
GASNRAT

SEQ ID NO: 783 - protein, 9 aa, synthetic construct
  REGION 1..9: note = Description of Artificial Sequence: Synthetic peptide
  REGION 1..9: note = Synthetic Construct
QQDDSAPYT

SEQ ID NO: 784 - protein, 122 aa, synthetic construct; identical to SEQ ID NO: 636
  REGION 1..122: note = Description of Artificial Sequence: Synthetic polypeptide
  REGION 1..122: note = Synthetic Construct

SEQ ID NO: 785 - protein, 108 aa, synthetic construct
  REGION 1..108: note = Description of Artificial Sequence: Synthetic polypeptide
  REGION 1..108: note = Synthetic Construct
EIVMTQSPGTLSLSPGERATLSCRASQSVSSSYLAWYQQKPGQAPRLLIYGASNRATGIPDRFSGSGSGTDFTLTISRLEPEDFAVYYCQQDDSAPYTFGGGTKVEIK

SEQ ID NO: 786 - protein, 123 aa, synthetic construct
  REGION 1..123: note = Description of Artificial Sequence: Synthetic polypeptide
  REGION 1..123: note = Synthetic Construct
QVQLVQSGAEVKKPGASVKVSCKASGYTFTSYYIHWVRQAPGQGLEWMGIINPSGGSTSYAQKFQGRVTMTRDTSTSTVYMELSSLRSEDTAVYYCAREADDSSGYPLGLDVWGQGTMVTVSS

SEQ ID NO: 787 - protein, 107 aa, synthetic construct
  REGION 1..107: note = Description of Artificial Sequence: Synthetic polypeptide
  REGION 1..107: note = Synthetic Construct
EIVMTQSPATLSVSPGERATLSCRASQSVSSNLAWYQQKPGQAPRLLIYGASTRATGIPARFSGSGSGTEFTLTISSLQSEDFAVYYCQQVNSLPPTFGGGTKVEIK

SEQ ID NO: 788 - protein, 17 aa, synthetic construct
  REGION 1..17: note = Description of Artificial Sequence: Synthetic peptide
  REGION 1..17: note = Synthetic Construct
LQVTDSGLYRCVIYHPP

SEQ ID NO: 789 - protein, 21 aa, synthetic construct
  REGION 1..21: note = Description of Artificial Sequence: Synthetic peptide
  REGION 1..21: note = Synthetic Construct
MEVGWYRSPFSRVVHLYRNGK

SEQ ID NO: 790 - DNA, 21 bp, synthetic construct
  misc_feature 1..21: note = Description of Artificial Sequence: Synthetic oligonucleotide
  misc_feature 1..21: note = Synthetic Construct
  source 1..21: mol_type = other DNA
ctccactcacggcaaattcaa

SEQ ID NO: 791 - DNA, 22 bp, synthetic construct
  misc_feature 1..22: note = Description of Artificial Sequence: Synthetic oligonucleotide
  misc_feature 1..22: note = Synthetic Construct
  source 1..22: mol_type = other DNA
gatgacaagcttcccattctcg

SEQ ID NO: 792 - DNA, 21 bp, synthetic construct
  misc_feature 1..21: note = Description of Artificial Sequence: Synthetic oligonucleotide
  misc_feature 1..21: note = Synthetic Construct
  source 1..21: mol_type = other DNA
ccgtcagccgatttgctatct

SEQ ID NO: 793 - DNA, 22 bp, synthetic construct
  misc_feature 1..22: note = Description of Artificial Sequence: Synthetic oligonucleotide
  misc_feature 1..22: note = Synthetic Construct
  source 1..22: mol_type = other DNA
acggcagagaggaggttgactt

SEQ ID NO: 794 - DNA, 22 bp, synthetic construct
  misc_feature 1..22: note = Description of Artificial Sequence: Synthetic oligonucleotide
  misc_feature 1..22: note = Synthetic Construct
  source 1..22: mol_type = other DNA
acaacaaaaaagcctcgtgctg

SEQ ID NO: 795 - DNA, 22 bp, synthetic construct
  misc_feature 1..22: note = Description of Artificial Sequence: Synthetic oligonucleotide
  misc_feature 1..22: note = Synthetic Construct
  source 1..22: mol_type = other DNA
ccattgaggtggagagctttca

SEQ ID NO: 796 - DNA, 22 bp, synthetic construct
  misc_feature 1..22: note = Description of Artificial Sequence: Synthetic oligonucleotide
  misc_feature 1..22: note = Synthetic Construct
  source 1..22: mol_type = other DNA
ggcaaacccaaggtctacgttc

SEQ ID NO: 797 - DNA, 21 bp, synthetic construct
  misc_feature 1..21: note = Description of Artificial Sequence: Synthetic oligonucleotide
  misc_feature 1..21: note = Synthetic Construct
  source 1..21: mol_type = other DNA
tacctcattggccagctgctt

SEQ ID NO: 798 - DNA, 20 bp, synthetic construct
  misc_feature 1..20: note = Description of Artificial Sequence: Synthetic oligonucleotide
  misc_feature 1..20: note = Synthetic Construct
  source 1..20: mol_type = other DNA
aggacctgggttggaagtgg

SEQ ID NO: 799 - DNA, 20 bp, synthetic construct
  misc_feature 1..20: note = Description of Artificial Sequence: Synthetic oligonucleotide
  misc_feature 1..20: note = Synthetic Construct
  source 1..20: mol_type = other DNA
agttggcatggtagcccttg

SEQ ID NO: 800 - protein, 132 aa, Homo sapiens
MEPLRLLILLFVTELSGAHNTTVFQGVAGQSLQVSCPYDSMKHWGRRKAWCRQLGEKGPCQRVVSTHNLWLLSFLRRWNGSTAITDDTLGGTLTITLRNLQPHDAGLYQCQSLHGSEADTLRKVLVEVLADP

SEQ ID NO: 801 - protein, 126 aa, Homo sapiens
LHPLLLLLLLFPGSQAQSKAQVLQSVAGQTLTVRCQYPPTGSLYEKKGWCKEASALVCIRLVTSSKPRTMAWTSRFTIWDDPDAGFFTVTMTDLREEDSGHYWCRIYRPSDNSVSKSVRFYLVVSP

SEQ ID NO: 802 - protein, 105 aa, Homo sapiens
LLWMLFVSELRAATKLTEEKYELKEGQTLDVKCDYTLEKFASSQKAWQIIRDGEMPKTLACTERPSKNSHPVQVGRIILEDYHDHGLLRVRMVNLQVEDSGLYQC

SEQ ID NO: 803 - protein, 118 aa, Homo sapiens
ELRAATKLTGEKYELKEGQTLDVKCDYTLEKFASSQKAWQIIRDGEMPKTLACTERPSKNSHPVQVGRIILEDYHDHGLLRVRMVNLQVEDSGLYQCVIYQPPKEPHMLFDRIRLVVT

SEQ ID NO: 804 - protein, 121 aa, Homo sapiens
VTELSGAHNTTVFQGVAGQSLQVSCPYDSMKHWGRRKAWCRQLGEKGPCQRVVSTHNLWLLSFLRRWNGSTAITDDTLGGTLTITLRNLQPHDAGLYQCQSLHGSEADTLRKVLVEVLADP

SEQ ID NO: 805 - protein, 120 aa, Mus musculus
EVKAAIVLEEERYDLVEGQTLTVKCPFNIMKYANSQKAWQRLPDGKEPLTLVVTQRPFTRPSEVHMGKFTLKHDPSEAMLQVQMTDLQVTDSGLYRCVIYHPPNDPVVLFHPVRLVVTKG

SEQ ID NO: 806 - protein, 121 aa, Mus musculus
ITALSQALNTTVLQGMAGQSLRVSCTYDALKHWGRRKAWCRQLGEEGPCQRVVSTHGVWAAGLPEEADGSTVIADDTLAGTVTITLKNLQAGDAGLYQCQSLRGREREVLQKVLVEVLEDP

SEQ ID NO: 807 - protein, 121 aa, Mus musculus
LCVSGLQAGDEEEHKCFLEGENLTLTCPYNIMLYSLSLKAWQRVRSHGSPETLVLTNTRKADFNVARAGKYLLEDYPTESVVKVTVTGLQRQDVGLYQCVVYLSPDNVIILRQRIRLAWCQ

SEQ ID NO: 808 - protein, 112 aa, Homo sapiens
SQAQSKAQVLQSVAGQTLTVRCQYPPTGSLYEKKGWCKEASALVCIRLVTSSKPRTMAWTSRFTIWDDPDAGFFTVTMTDLREEDSGHYWCRIYRPSDNSVSKSVRFYLVVS

SEQ ID NO: 809 - protein, 109 aa, Homo sapiens
EVEQNSGPLSVPEGAIASLNCTYSDRGSQSFFWYRQYSGKSPELIMSIYSNGDKEDGRFTAQLNKASQYVSLLIRDSQPSDSATYLCAVTTDSWGKLQFGAGTQVVVTP

SEQ ID NO: 810 - protein, 114 aa, Homo sapiens
GVTQTPKFQVLKTGQSMTLQCAQDMNHEYMSWYRQDPGMGLRLIHYSVGAGITDQGEVPNGYNVSRSTTEDFPLRLLSAAPSQTSVYFCASRPGLAGGRPEQYFGPGTRLTVTE

SEQ ID NO: 811 - protein, 121 aa, Homo sapiens
HLEQPQISSTKTLSKTARLECVVSGITISATSVYWYRERPGEVIQFLVSISYDGTVRKESGIPSGKFEVDRIPETSTSTLTIHNVEKQDIATYYCALWEAQQELGKKIKVFGPGTKLIITD

SEQ ID NO: 812 - protein, 119 aa, Homo sapiens
AIELVPEHQTVPVSIGVPATLRCSMKGEAIGNYYINWYRKTQGNTMTFIYREKDIYGPGFKDNFQGDIDIAKNLAVLKILAPSERDEGSYYCACDTLGMGGEYTDKLIFGKGTRVTVEP

SEQ ID NO: 813 - protein, 116 aa, Homo sapiens
DKVTQSSPDQTVASGSEVVLLCTYDTVYSNPDLFWYRIRPDYSFQFVFYGDDSRSEGADFTQGRFSVKHILTQKAFHLVISPVRTEDSATYYCAFTLPPPTDKLIFGKGTRVTVEP

SEQ ID NO: 814 - protein, 115 aa, Mus musculus
QLQQSGAELMKPGASVKISCKASGYTFSDYWIEWVKQRPGHGLEWIGEILPGSGSTNYHERFKGKATFTADTSSSTAYMQLNSLTSEDSGVYYCLHGNYDFDGWGQGTTLTVSSA

SEQ ID NO: 815 - protein, 103 aa, Mus musculus
VLTQSPAIMSASPGEKVTMTCSASSSVNYMYWYQQKSGTPKRWIYDTSKLASGVPVRFSGSGSGTSYSLTISSMETEDAATYYCQQWGRNPTFGGGTKLEIKR

SEQ ID NO: 816 - protein, 113 aa, Homo sapiens
QFRVSPLDRTWNLGETVELKCQVLLSNPTSGCSWLFQPRGAAASPTFLLYLSQNKPKAAEGLDTQRFSGKRLGDTFVLTLSDFRRENEGYYFCSALSNSIMYFSHFVPVFLPA

SEQ ID NO: 817 - protein, 115 aa, Homo sapiens
HVAQPAVVLASSRGIASFVCEYASPGKATEVRVTVLRQADSQVTEVCAATYMMGNELTFLDDSICTGTSSGNQVNLTIQGLRAMDTGLYICKVELMYPPPYYLGIGNGTQIYVID

SEQ ID NO: 818 - protein, 9 aa, synthetic construct
  REGION 1..9: note = Description of Artificial Sequence: Synthetic peptide
  REGION 1..9: note = Synthetic Construct
AWCRQLGEK

SEQ ID NO: 819 - protein, 7 aa, synthetic construct
  REGION 1..7: note = Description of Artificial Sequence: Synthetic peptide
  REGION 1..7: note = Synthetic Construct
HWGRRAW

SEQ ID NO: 820 - protein, 132 aa, synthetic construct
  REGION 1..132: note = Description of Artificial Sequence: Synthetic polypeptide
  REGION 1..132: note = Consensus Sequence
  VARIANT 1..2: note = Any Amino Acid
  VARIANT 5: note = Any naturally occurring amino acid
  VARIANT 8: note = Any naturally occurring amino acid
  VARIANT 12..22: note = Any naturally occurring amino acid
  VARIANT 24: note = Any naturally occurring amino acid
  VARIANT 26: note = Any naturally occurring amino acid
  VARIANT 31: note = Any naturally occurring amino acid
  VARIANT 33: note = Any naturally occurring amino acid
  VARIANT 35: note = Any naturally occurring amino acid
  VARIANT 37: note = Any naturally occurring amino acid
  VARIANT 39..47: note = Any naturally occurring amino acid
  VARIANT 49: note = Any naturally occurring amino acid
  VARIANT 52..59: note = Any naturally occurring amino acid
  VARIANT 61: note = Any naturally occurring amino acid
  VARIANT 63: note = Any naturally occurring amino acid
  VARIANT 65..77: note = Any naturally occurring amino acid
  VARIANT 79..83: note = Any naturally occurring amino acid
  VARIANT 85: note = Any Amino Acid
  VARIANT 88: note = Any Amino Acid
  VARIANT 89..90: note = Any naturally occurring amino acid
  VARIANT 92..93: note = Any naturally occurring amino acid
  VARIANT 95: note = Any naturally occurring amino acid
  VARIANT 97..99: note = Any naturally occurring amino acid
  VARIANT 101..103: note = Any naturally occurring amino acid
  VARIANT 105: note = Any naturally occurring amino acid
  VARIANT 107: note = Any naturally occurring amino acid
  VARIANT 109: note = Any naturally occurring amino acid
  VARIANT 111..115: note = Any naturally occurring amino acid
  VARIANT 117..123: note = Any naturally occurring amino acid
  VARIANT 125..131: note = Any naturally occurring amino acid
XXPLXLLXLLFXXXXXXXXXXXVXQXVAGQXLXVXCXYXXXXXXXXXKXWCXXXXXXXXCXRXVXXXXXXXXXXXXXWXXXXXIXDDXXXGXXTXTXXXLXXXDXGXYXCXXXXXSXXXXXXXVXXXXXXXP

SEQ ID NO: 821 - protein, 107 aa, synthetic construct
  REGION 1..107: note = Description of Artificial Sequence: Synthetic polypeptide
  REGION 1..107: note = Consensus Sequence
  VARIANT 3..4: note = Any Amino Acid
  VARIANT 8: note = Any naturally occurring amino acid
  VARIANT 11..12: note = Any naturally occurring amino acid
  VARIANT 14..16: note = Any naturally occurring amino acid
  VARIANT 18..25: note = Any naturally occurring amino acid
  VARIANT 28: note = Any naturally occurring amino acid
  VARIANT 30: note = Any naturally occurring amino acid
  VARIANT 32: note = Any naturally occurring amino acid
  VARIANT 34: note = Any naturally occurring amino acid
  VARIANT 36..38: note = Any naturally occurring amino acid
  VARIANT 40..44: note = Any naturally occurring amino acid
  VARIANT 48..49: note = Any Amino Acid or absent
  VARIANT 51..52: note = Any Amino Acid
  VARIANT 53..54: note = Any naturally occurring amino acid
  VARIANT 56..76: note = Any naturally occurring amino acid
  VARIANT 78..81: note = Any naturally occurring amino acid
  VARIANT 82: note = Any Amino Acid
  VARIANT 84: note = Any Amino Acid
  VARIANT 85..87: note = Any naturally occurring amino acid
  VARIANT 89: note = Any naturally occurring amino acid
  VARIANT 91..95: note = Any naturally occurring amino acid
  VARIANT 99..100: note = Any naturally occurring amino acid
  VARIANT 102: note = Any naturally occurring amino acid
LLXXLFVXELXXAXXXTXXXXXXXXGQXLXVXCXYXXXKXXXXXKAWXXQXXXXGXXXXXXXXXXXXXXXXXXXXXGXXXXXDXXXXGXLXXXXXNLQXXDXGLYQC

SEQ ID NO: 822 - protein, 227 aa, Mus musculus
MGPLHQFLLLLITALSQALNTTVLQGMAGQSLRVSCTYDALKHWGRRKAWCRQLGEEGPCQRVVSTHGVWLLAFLKKRNGSTVIADDTLAGTVTITLKNLQAGDAGLYQCQSLRGREAEVLQKVLVEVLEDPLDDQDAGDLWVPEESSSFEGAQVEHSTSRNQETSFPPTSILLLLACVLLSKFLAASILWAVARGRQKPGTPVVRGLDCGQDAGHQLQILTGPGGT

SEQ ID NO: 823 - protein, 228 aa, Rattus norvegicus
MEPLHVFVLLLVTELSQALNTTVLQGVAGQSLRVSCTYDALRHWGRRKAWCRQLAEEGPCQRVVSTHGVWLLAFLRKQNGSTVITDDTLAGTVTITLRNLQAGDAGLYQCQSLRGREAEVLQKVVVEVLEDPLDDQDAGDLWVPEESESFEGAQVEHSTSSQVSSCGSPLTYHLPPKEPIRKDLLPTHFHSSPPGLCPPEQASYSQHPLGCGQGQAEAGDTCGQWARL

SEQ ID NO: 824 - protein, 260 aa, Macaca mulatta
MPDPLFSAVQGKDKILHKALCICPWPGKGGMEPLRLLILLFATELSGAHNTTVFQGVEGQSLQVSCPYDSMKHWGRRKAWCRQLGEKGPCQRVVSTHNLWLLSFLRRRNGSTAITDDTLGGTLTITLRNLQPHDAGFYQCQSLHGSEADTLRKVLVEVLADPLDHRDAGDLWVPGESESFEDAHVEHSISRSLLEGEIPFPPTSVLLLLACIFLIKILAASALWAAAWHGQKPGTHPPSEPDCGHDPGHQLQTLPGLRDT

SEQ ID NO: 825 - protein, 230 aa, Bos taurus
MEPVVLLILLAVTELSRAHNTTVFQGMMGRSLRVSCPYNSLKHWGRRKAWCRQLGEEGLCQQVVSTHPSWLLSFLKRRNGSTAITDDALGGTLTITLRNLQTHDAGLYQCQSLHGSEADTLRKVLVEVLADPRDYQDPGDLWIPEGSESFENAQVEHSISRSLSEEESPFPPTSILFLLACIFLSKLLAASALWAAAWHGQKQRPPQASGPDCGHNPGYQLQTLTELRDV

SEQ ID NO: 826 - protein, 230 aa, Equus caballus
MEPLPLLILLSVAELSRGHNTTVFQGTAGRSLKVSCPYNSLMHWGRRKAWCRQLGEDGPCQQVVSTHSLWLLSFLKRRNGSTVITDDALGGILTITLRNLQAHDAGFYQCQSLHGGEADTLRKVLVEVLADPLDHQEPGDLWIPKESESFEDAQVEHSISRSLVEEEIPSLPTSILLLLACIFLSKLLAASAIWAAAWHGQKQETPPASEPDRGHDPGYQLHTLTGERDT

SEQ ID NO: 827 - protein, 233 aa, Sus scrofa
  source 1..233: note = Sus domesticus
METLGLLLLLWVAELSRAHNTSVFQGTAGQSLRVSCSYNSLKHWGRRKAWCRQLSEEGLCQHVVSTHPTWLLSFLKRRNGSTAITDDALGGTLTITLRNLQAHDAGLYQCQSLHGSEADTLKKVLVEVLADPLESQSKSFQDVQMEHSISRNLSEESLFPPTSTLFLLACVFLSKLLVASALWAAAWHGHKQRTSPAGGLDCGRDPGDQDQTLTDELGESSDQDQTLTELRDT

SEQ ID NO: 828 - protein, 230 aa, Canis lupus
  source 1..230: note = Canis familiaris
MEPLWLLILLAVTELSGAHNTTVFQGMAGRSLQVSCPYNSLKHWGRRKAWCRQVDKEGPCQRVVSTHRSWLLSFLKRWNGSTAIVDDALGGTLTITLRNLQAHDAGLYQCQSLYGDEADTLRKVLVEVLADPLDHLDPGDLWIPEESKGFEDAHVEPSVSRSLSEEEIPFPPTSILFLLACIFLSKFLAASALWAAAWRGQKLGTPQASELDCSCDPGYQLQTLTEPRDM

SEQ ID NO: 829 - protein, 11 aa, synthetic construct
  REGION 1..11: note = Description of Artificial Sequence: Synthetic peptide
  REGION 1..11: note = Synthetic Construct
RASENIYSFLA

SEQ ID NO: 830 - protein, 17 aa, synthetic construct
  REGION 1..17: note = Description of Artificial Sequence: Synthetic peptide
  REGION 1..17: note = Synthetic Construct
KSSQSLLYSSNQKNCLA

SEQ ID NO: 831 - protein, 16 aa, synthetic construct
  REGION 1..16: note = Description of Artificial Sequence: Synthetic peptide
  REGION 1..16: note = Synthetic Construct
KSSQSLLYSNGKTFLS

SEQ ID NO: 832 - protein, 16 aa, synthetic construct
  REGION 1..16: note = Description of Artificial Sequence: Synthetic peptide
  REGION 1..16: note = Synthetic Construct
KSSQSLLDSDGKTYLN

SEQ ID NO: 833 - protein, 10 aa, synthetic construct
  REGION 1..10: note = Description of Artificial Sequence: Synthetic peptide
  REGION 1..10: note = Synthetic Construct
SASSSVSYMY

SEQ ID NO: 834 - protein, 16 aa, synthetic construct
  REGION 1..16: note = Description of Artificial Sequence: Synthetic peptide
  REGION 1..16: note = Synthetic Construct
RSSQSLVHSNGNTYLH

SEQ ID NO: 835 - protein, 16 aa, synthetic construct
  REGION 1..16: note = Description of Artificial Sequence: Synthetic peptide
  REGION 1..16: note = Synthetic Construct
RSSQTIIHSNGNTYLE

SEQ ID NO: 836 - protein, 17 aa, synthetic construct
  REGION 1..17: note = Description of Artificial Sequence: Synthetic peptide
  REGION 1..17: note = Synthetic Construct
KSSQSLLYSSDQKNYLA

SEQ ID NO: 837 - protein, 11 aa, synthetic construct
  REGION 1..11: note = Description of Artificial Sequence: Synthetic peptide
  REGION 1..11: note = Synthetic Construct
RASENIYSYLA

SEQ ID NO: 838 - protein, 11 aa, synthetic construct
  REGION 1..11: note = Description of Artificial Sequence: Synthetic peptide
  REGION 1..11: note = Synthetic Construct
RTSENVYSNLA

SEQ ID NO: 839 - protein, 16 aa, synthetic construct
  REGION 1..16: note = Description of Artificial Sequence: Synthetic peptide
  REGION 1..16: note = Synthetic Construct
RSSQSLVHSNGYTYLH

SEQ ID NO: 840 - protein, 16 aa, synthetic construct
  REGION 1..16: note = Description of Artificial Sequence: Synthetic peptide
  REGION 1..16: note = Synthetic Construct
RFSQSLVHSNGNTYLH

SEQ ID NO: 841 - protein, 10 aa, synthetic construct
  REGION 1..10: note = Description of Artificial Sequence: Synthetic peptide
  REGION 1..10: note = Synthetic Construct
KASSNVNYMS

SEQ ID NO: 842 - protein, 17 aa, synthetic construct
  REGION 1..17: note = Description of Artificial Sequence: Synthetic peptide
  REGION 1..17: note = Synthetic Construct
KSSQSLLNSGNQKKYLT

SEQ ID NO: 843 - protein, 17 aa, synthetic construct
  REGION 1..17: note = Description of Artificial Sequence: Synthetic peptide
  REGION 1..17: note = Synthetic Construct
KSSQSLLYSGNQKNFLA

SEQ ID NO: 844 - protein, 7 aa, synthetic construct
  REGION 1..7: note = Description of Artificial Sequence: Synthetic peptide
  REGION 1..7: note = Synthetic Construct
NSKTFAE

SEQ ID NO: 845 - protein, 7 aa, synthetic construct
  REGION 1..7: note = Description of Artificial Sequence: Synthetic peptide
  REGION 1..7: note = Synthetic Construct
WAFTRES

SEQ ID NO: 846 - protein, 7 aa, synthetic construct
  REGION 1..7: note = Description of Artificial Sequence: Synthetic peptide
  REGION 1..7: note = Synthetic Construct
LVSKLDS

SEQ ID NO: 847 - protein, 7 aa, synthetic construct
  REGION 1..7: note = Description of Artificial Sequence: Synthetic peptide
  REGION 1..7: note = Synthetic Construct
LTSILAS

SEQ ID NO: 848 - protein, 7 aa, synthetic construct
  REGION 1..7: note = Description of Artificial Sequence: Synthetic peptide
  REGION 1..7: note = Synthetic Construct
KVSNRFS

SEQ ID NO: 849 - protein, 7 aa, synthetic construct
  REGION 1..7: note = Description of Artificial Sequence: Synthetic peptide
  REGION 1..7: note = Synthetic Construct
WASTRES

SEQ ID NO: 850 - protein, 7 aa, synthetic construct
  REGION 1..7: note = Description of Artificial Sequence: Synthetic peptide
  REGION 1..7: note = Synthetic Construct
KAKTLAE

SEQ ID NO: 851 - protein, 7 aa, synthetic construct
  REGION 1..7: note = Description of Artificial Sequence: Synthetic peptide
  REGION 1..7: note = Synthetic Construct
AATNLAD

SEQ ID NO: 852 - protein, 7 aa, synthetic construct
  REGION 1..7: note = Description of Artificial Sequence: Synthetic peptide
  REGION 1..7: note = Synthetic Construct
FTSNLPS

SEQ ID NO: 853 - protein, 7 aa, synthetic construct
  REGION 1..7: note = Description of Artificial Sequence: Synthetic peptide
  REGION 1..7: note = Synthetic Construct
KVSNRFC

SEQ ID NO: 854 - protein, 10 aa, synthetic construct
  REGION 1..10: note = Description of Artificial Sequence: Synthetic peptide
  REGION 1..10: note = Synthetic Construct
QHHYGTPPWT

SEQ ID NO: 855 - protein, 9 aa, synthetic construct
  REGION 1..9: note = Description of Artificial Sequence: Synthetic peptide
  REGION 1..9: note = Synthetic Construct
QQYYSYPLT

SEQ ID NO: 856 - protein, 9 aa, synthetic construct
  REGION 1..9: note = Description of Artificial Sequence: Synthetic peptide
  REGION 1..9: note = Synthetic Construct
MQGTHFPLT

SEQ ID NO: 857 - protein, 9 aa, synthetic construct
  REGION 1..9: note = Description of Artificial Sequence: Synthetic peptide
  REGION 1..9: note = Synthetic Construct
WQGTHFPYT

SEQ ID NO: 858 - protein, 9 aa, synthetic construct
  REGION 1..9: note = Description of Artificial Sequence: Synthetic peptide
  REGION 1..9: note = Synthetic Construct
QQWSFNPYT

SEQ ID NO: 859 - protein, 9 aa, synthetic construct
  REGION 1..9: note = Description of Artificial Sequence: Synthetic peptide
  REGION 1..9: note = Synthetic Construct
SQSTHVPLT

SEQ ID NO: 860 - protein, 9 aa, synthetic construct
  REGION 1..9: note = Description of Artificial Sequence: Synthetic peptide
  REGION 1..9: note = Synthetic Construct
FQGSHVPYT

SEQ ID NO: 861 - protein, 9 aa, synthetic construct
  REGION 1..9: note = Description of Artificial Sequence: Synthetic peptide
  REGION 1..9: note = Synthetic Construct
QHHYGTPFT

SEQ ID NO: 862 - protein, 9 aa, synthetic construct
  REGION 1..9: note = Description of Artificial Sequence: Synthetic peptide
  REGION 1..9: note = Synthetic Construct
HHFWGTPYT

SEQ ID NO: 863 - protein, 9 aa, synthetic construct
  REGION 1..9: note = Description of Artificial Sequence: Synthetic peptide
  REGION 1..9: note = Synthetic Construct
SQSTRVPYT

SEQ ID NO: 864 - protein, 9 aa, synthetic construct
  REGION 1..9: note = Description of Artificial Sequence: Synthetic peptide
  REGION 1..9: note = Synthetic Construct
SQSTRVPPT

SEQ ID NO: 865 - protein, 8 aa, synthetic construct
  REGION 1..8: note = Description of Artificial Sequence: Synthetic peptide
  REGION 1..8: note = Synthetic Construct
SGEVTQFT

SEQ ID NO: 866 - protein, 9 aa, synthetic construct
  REGION 1..9: note = Description of Artificial Sequence: Synthetic peptide
  REGION 1..9: note = Synthetic Construct
QNDYGFPLT

SEQ ID NO: 867 - protein, 9 aa, synthetic construct
  REGION 1..9: note = Description of Artificial Sequence: Synthetic peptide
  REGION 1..9: note = Synthetic Construct
QQYYSYPFT

SEQ ID NO: 868 - protein, 9 aa, synthetic construct
  REGION 1..9: note = Description of Artificial Sequence: Synthetic peptide
  REGION 1..9: note = Synthetic Construct
FTLSSYAMS

SEQ ID NO: 869 - protein, 9 aa, synthetic construct
  REGION 1..9: note = Description of Artificial Sequence: Synthetic peptide
  REGION 1..9: note = Synthetic Construct
YTFTEYTMH

SEQ ID NO: 870 - protein, 9 aa, synthetic construct
  REGION 1..9: note = Description of Artificial Sequence: Synthetic peptide
  REGION 1..9: note = Synthetic Construct
YTFTDYEMH

SEQ ID NO: 871 - protein, 9 aa, synthetic construct
  REGION 1..9: note = Description of Artificial Sequence: Synthetic peptide
  REGION 1..9: note = Synthetic Construct
FTFSDAWMG

SEQ ID NO: 872 - protein, 9 aa, synthetic construct
  REGION 1..9: note = Description of Artificial Sequence: Synthetic peptide
  REGION 1..9: note = Synthetic Construct
FSFNTYAMN

SEQ ID NO: 873 - protein, 9 aa, synthetic construct
  REGION 1..9: note = Description of Artificial Sequence: Synthetic peptide
  REGION 1..9: note = Synthetic Construct
YTVSRYWMH

SEQ ID NO: 874 - protein, 9 aa, synthetic construct
  REGION 1..9: note = Description of Artificial Sequence: Synthetic peptide
  REGION 1..9: note = Synthetic Construct
YPFSNFWIT

SEQ ID NO: 875 - protein, 9 aa, synthetic construct
  REGION 1..9: note = Description of Artificial Sequence: Synthetic peptide
  REGION 1..9: note = Synthetic Construct
LTSNTYTQT

SEQ ID NO: 876 - protein, 9 aa, synthetic construct
  REGION 1..9: note = Description of Artificial Sequence: Synthetic peptide
  REGION 1..9: note = Synthetic Construct
FTFSDAWMD

SEQ ID NO: 877 - protein, 9 aa, synthetic construct
  REGION 1..9: note = Description of Artificial Sequence: Synthetic peptide
  REGION 1..9: note = Synthetic Construct
FTFNTYSMN

SEQ ID NO: 878 - protein, 9 aa, synthetic construct
  REGION 1..9: note = Description of Artificial Sequence: Synthetic peptide
  REGION 1..9: note = Synthetic Construct
YTFTTYWIH

SEQ ID NO: 879 - protein, 9 aa, synthetic construct
  REGION 1..9: note = Description of Artificial Sequence: Synthetic peptide
  REGION 1..9: note = Synthetic Construct
YAFSNYWMS

SEQ ID NO: 880 - protein, 9 aa, synthetic construct
  REGION 1..9: note = Description of Artificial Sequence: Synthetic peptide
  REGION 1..9: note = Synthetic Construct
YAFSSSWMN

SEQ ID NO: 881 - protein, 9 aa, synthetic construct
  REGION 1..9: note = Description of Artificial Sequence: Synthetic peptide
  REGION 1..9: note = Synthetic Construct
YIFTTYWIH

SEQ ID NO: 882 - protein, 9 aa, synthetic construct
  REGION 1..9: note = Description of Artificial Sequence: Synthetic peptide
  REGION 1..9: note = Synthetic Construct
FNFNTYAMK

SEQ ID NO: 883 - protein, 9 aa, synthetic construct
  REGION 1..9: note = Description of Artificial Sequence: Synthetic peptide
  REGION 1..9: note = Synthetic Construct
FNFNTYAMN

SEQ ID NO: 884 - protein, 9 aa, synthetic construct
  REGION 1..9: note = Description of Artificial Sequence: Synthetic peptide
  REGION 1..9: note = Synthetic Construct
YTFSDYYIH

SEQ ID NO: 885 - protein, 9 aa, synthetic construct
  REGION 1..9: note = Description of Artificial Sequence: Synthetic peptide
  REGION 1..9: note = Synthetic Construct
FRFNTYAMT

SEQ ID NO: 886 - protein, 13 aa, synthetic construct
  REGION 1..13: note = Description of Artificial Sequence: Synthetic peptide
  REGION 1..13: note = Synthetic Construct
VASISRGGSTYYP

SEQ ID NO: 887 - protein, 14 aa, synthetic construct
  REGION 1..14: note = Description of Artificial Sequence: Synthetic peptide
  REGION 1..14: note = Synthetic Construct
IGGINPNNGGTSYS

SEQ ID NO: 888 - protein, 14 aa, synthetic construct
  REGION 1..14: note = Description of Artificial Sequence: Synthetic peptide
  REGION 1..14: note = Synthetic Construct
IGVIDPETGGTAYN

SEQ ID NO: 889 - protein, 16 aa, synthetic construct
  REGION 1..16: note = Description of Artificial Sequence: Synthetic peptide
  REGION 1..16: note = Synthetic Construct
VAEIRDKVKNHATYYA

SEQ ID NO: 890 - protein, 16 aa, synthetic construct
  REGION 1..16: note = Description of Artificial Sequence: Synthetic peptide
  REGION 1..16: note = Synthetic Construct
IARIRSKSNNYATYYA

SEQ ID NO: 891 - protein, 14 aa, synthetic construct
  REGION 1..14: note = Description of Artificial Sequence: Synthetic peptide
  REGION 1..14: note = Synthetic Construct
IGRIDPNSGGTKYN

SEQ ID NO: 892 - protein, 14 aa, synthetic construct
  REGION 1..14: note = Description of Artificial Sequence: Synthetic peptide
  REGION 1..14: note = Synthetic Construct
IGDIYPGSDNSNYN

SEQ ID NO: 893 - protein, 16 aa, synthetic construct
  REGION 1..16: note = Description of Artificial Sequence: Synthetic peptide
  REGION 1..16: note = Synthetic Construct
ESVIRSKSNNFSTLYA

SEQ ID NO: 894 - protein, 16 aa, synthetic construct
  REGION 1..16: note = Description of Artificial Sequence: Synthetic peptide
  REGION 1..16: note = Synthetic Construct
VAEIRNKVNNHATYYA

SEQ ID NO: 895 - protein, 16 aa, synthetic construct
  REGION 1..16: note = Description of Artificial Sequence: Synthetic peptide
  REGION 1..16: note = Synthetic Construct
  VARIANT 8: note = Glutamic acid or Glutamine
VAHIKTKXNNFATFYA

SEQ ID NO: 896 - protein, 14 aa, synthetic construct
  REGION 1..14: note = Description of Artificial Sequence: Synthetic peptide
  REGION 1..14: note = Synthetic Construct
IGRNDPNSGGSNYN

SEQ ID NO: 897 - protein, 14 aa, synthetic construct
  REGION 1..14: note = Description of Artificial Sequence: Synthetic peptide
  REGION 1..14: note = Synthetic Construct
IGQIYPGDGDTKYN

SEQ ID NO: 898 - protein, 14 aa, synthetic construct
  REGION 1..14: note = Description of Artificial Sequence: Synthetic peptide
  REGION 1..14: note = Synthetic Construct
IGRIYPGDGDTNYN

SEQ ID NO: 899 - protein, 14 aa, synthetic construct
  REGION 1..14: note = Description of Artificial Sequence: Synthetic peptide
  REGION 1..14: note = Synthetic Construct
IGRIDPNNGDTNYN

SEQ ID NO: 900 - protein, 16 aa, synthetic construct
  REGION 1..16: note = Description of Artificial Sequence: Synthetic peptide
  REGION 1..16: note = Synthetic Construct
IARIRSNSNDYATNYS

SEQ ID NO: 901 - protein, 14 aa, synthetic construct
  REGION 1..14: note = Description of Artificial Sequence: Synthetic peptide
  REGION 1..14: note = Synthetic Construct
IGDIYPGSDNRNFN

SEQ ID NO: 902 - protein, 16 aa, synthetic construct
  REGION 1..16: note = Description of Artificial Sequence: Synthetic peptide
  REGION 1..16: note = Synthetic Construct
VARIRSKSNNYATYYA

SEQ ID NO: 903 - protein, 14 aa, synthetic construct
  REGION 1..14: note = Description of Artificial Sequence: Synthetic peptide
  REGION 1..14: note = Synthetic Construct
IGYIYPNNGDNGYN

SEQ ID NO: 904 - protein, 16 aa, synthetic construct
  REGION 1..16: note = Description of Artificial Sequence: Synthetic peptide
  REGION 1..16: note = Synthetic Construct
EGVIRRKSSNFATLYA

SEQ ID NO: 905 - protein, 13 aa, synthetic construct
  REGION 1..13: note = Description of Artificial Sequence: Synthetic peptide
  REGION 1..13: note = Synthetic Construct
TRGYGYYRTPFAN

SEQ ID NO: 906 - protein, 12 aa, synthetic construct
  REGION 1..12: note = Description of Artificial Sequence: Synthetic peptide
  REGION 1..12: note = Synthetic Construct
ARGGSHYYAMDY

SEQ ID NO: 907 - protein, 18 aa, synthetic construct
  REGION 1..18: note = Description of Artificial Sequence: Synthetic peptide
  REGION 1..18: note = Synthetic Construct
TSPDYYGSSYPLYYAMDY

SEQ ID NO: 908 - protein, 7 aa, synthetic construct
  REGION 1..7: note = Description of Artificial Sequence: Synthetic peptide
  REGION 1..7: note = Synthetic Construct
RLGVFDY

SEQ ID NO: 909 - protein, 13 aa, synthetic construct
  REGION 1..13: note = Description of Artificial Sequence: Synthetic peptide
  REGION 1..13: note = Synthetic Construct
VRHGDGNLWYIDV

SEQ ID NO: 910 - protein, 9 aa, synthetic construct
  REGION 1..9: note = Description of Artificial Sequence: Synthetic peptide
  REGION 1..9: note = Synthetic Construct
VLTGTDFDY

SEQ ID NO: 911 - protein, 13 aa, synthetic construct
  REGION 1..13: note = Description of Artificial Sequence: Synthetic peptide
  REGION 1..13: note = Synthetic Construct
AREAYYTNPGFAY

SEQ ID NO: 912 - protein, 12 aa, synthetic construct
  REGION 1..12: note = Description of Artificial Sequence: Synthetic peptide
  REGION 1..12: note = Synthetic Construct
VRHKSNRYPGVY

SEQ ID NO: 913 - protein, 13 aa, synthetic construct
  REGION 1..13: note = Description of Artificial Sequence: Synthetic peptide
  REGION 1..13: note = Synthetic Construct
TSLYDGYYLRFAY

SEQ ID NO: 914 - protein, 12 aa, synthetic construct
  REGION 1..12: note = Description of Artificial Sequence: Synthetic peptide
  REGION 1..12: note = Synthetic Construct
  VARIANT 2: note = Glutamic acid or Glutamine
  VARIANT 4: note = Glutamic acid or Glutamine
VXHXSNNYPFAY

SEQ ID NO: 915 - protein, 9 aa, synthetic construct
  REGION 1..9: note = Description of Artificial Sequence: Synthetic peptide
  REGION 1..9: note = Synthetic Construct
VRTNWDGDF

SEQ ID NO: 916 - protein, 19 aa, synthetic construct
  REGION 1..19: note = Description of Artificial Sequence: Synthetic peptide
  REGION 1..19: note = Synthetic Construct
SREKGADYYGSTYSAWFSY

SEQ ID NO: 917 - protein, 16 aa, synthetic construct
  REGION 1..16: note = Description of Artificial Sequence: Synthetic peptide
  REGION 1..16: note = Synthetic Construct
ARLLRNQPGESYAMDY

SEQ ID NO: 918 - protein, 9 aa, synthetic construct
  REGION 1..9: note = Description of Artificial Sequence: Synthetic peptide
  REGION 1..9: note = Synthetic Construct
VMTGTDFDY

SEQ ID NO: 919 - protein, 12 aa, synthetic construct
  REGION 1..12: note = Description of Artificial Sequence: Synthetic peptide
  REGION 1..12: note = Synthetic Construct
VGHKINNYPFAH

SEQ ID NO: 920 - protein, 13 aa, synthetic construct
  REGION 1..13: note = Description of Artificial Sequence: Synthetic peptide
  REGION 1..13: note = Synthetic Construct
VRHYSNYGWGFAY

SEQ ID NO: 921 - protein, 12 aa, synthetic construct
  REGION 1..12: note = Description of Artificial Sequence: Synthetic peptide
  REGION 1..12: note = Synthetic Construct
ARRGYYGGSYDY

SEQ ID NO: 922 - protein, 12 aa, synthetic construct
  REGION 1..12: note = Description of Artificial Sequence: Synthetic peptide
  REGION 1..12: note = Synthetic Construct
VRHKSNKYPFVY

SEQ ID NO: 923 - protein, 23 aa, synthetic construct
  REGION 1..23: note = Description of Artificial Sequence: Synthetic peptide
  REGION 1..23: note = Synthetic Construct
  VARIANT 3: note = Glutamic acid or Glutamine
DIXVTQSPASLSASVGETVTITC

SEQ ID NO: 924 - protein, 21 aa, synthetic construct
  REGION 1..21: note = Description of Artificial Sequence: Synthetic peptide
  REGION 1..21: note = Synthetic Construct
TMSQSPSSLAVSVGEKVTMSC

SEQ ID NO: 925 - protein, 23 aa, synthetic construct
  REGION 1..23: note = Description of Artificial Sequence: Synthetic peptide
  REGION 1..23: note = Synthetic Construct
  VARIANT 3: note = Glutamic acid or Glutamine
DVXMTQTPLTLSVTIGQPASISC

SEQ ID NO: 926 - protein, 21 aa, synthetic construct
  REGION 1..21: note = Description of Artificial Sequence: Synthetic peptide
  REGION 1..21: note = Synthetic Construct
VLTQSPALMSASPGEKVTMTC

SEQ ID NO: 927 - protein, 23 aa, synthetic construct
  REGION 1..23: note = Description of Artificial Sequence: Synthetic peptide
  REGION 1..23: note = Synthetic Construct
  VARIANT 3: note = Glutamic acid or Glutamine
DVXMTQTPLSLPVSLGDQASISC

SEQ ID NO: 928 - protein, 21 aa, synthetic construct
  REGION 1..21: note = Description of Artificial Sequence: Synthetic peptide
  REGION 1..21: note = Synthetic Construct
  VARIANT 10: note = Glutamic acid or Glutamine
VLTQSPAIMXASPGEKVTMTC

SEQ ID NO: 929 - protein, 22 aa, synthetic construct
  REGION 1..22: note = Description of Artificial Sequence: Synthetic peptide
  REGION 1..22: note = Synthetic Construct
NVLTQSPALMSASPGEKVTMTC

SEQ ID NO: 930 - protein, 23 aa, synthetic construct
  REGION 1..23: note = Description of Artificial Sequence: Synthetic peptide
  REGION 1..23: note = Synthetic Construct
DVVMTQTPLSLPVSLGDQASISC

SEQ ID NO: 931 - protein, 23 aa, synthetic construct
  REGION 1..23: note = Description of Artificial Sequence: Synthetic peptide
  REGION 1..23: note = Synthetic Construct
DVVMTQTPLTLSVTIGQPASISC

SEQ ID NO: 932 - protein, 22 aa, synthetic construct
  REGION 1..22: note = Description of Artificial Sequence: Synthetic peptide
  REGION 1..22: note = Synthetic Construct
ITMSQSPSSLAVSVGEKVTMSC

SEQ ID NO: 933 - protein, 21 aa, synthetic construct
  REGION 1..21: note = Description of Artificial Sequence: Synthetic peptide
  REGION 1..21: note = Synthetic Construct
  VARIANT 10: note = Glutamic acid or Glutamine
  VARIANT 12: note = Glutamic acid or Glutamine
QMSQSPACLXAXVGESVTITC

SEQ ID NO: 934 - protein, 23 aa, synthetic construct
  REGION 1..23: note = Description of Artificial Sequence: Synthetic peptide
  REGION 1..23: note = Synthetic Construct
DIQMTQSPASLSVSVGETVTITC

SEQ ID NO: 935 - protein, 23 aa, synthetic construct
  REGION 1..23: note = Description of Artificial Sequence: Synthetic peptide
  REGION 1..23: note = Synthetic Construct
  VARIANT 3: note = Glutamic acid or Glutamine
DVXMTQNPLSLPVSLGDQASISC

SEQ ID NO: 936 - protein, 23 aa, synthetic construct
  REGION 1..23: note = Description of Artificial Sequence: Synthetic peptide
  REGION 1..23: note = Synthetic Construct
DVLMTQTPLSLPVSLGDQASISC

SEQ ID NO: 937 - protein, 22 aa, synthetic construct
  REGION 1..22: note = Description of Artificial Sequence: Synthetic peptide
  REGION 1..22: note = Synthetic Construct
  VARIANT 13: note = Glutamic acid or Glutamine
NVLTQSPALIWAXPGEKVTMTC

SEQ ID NO: 938 - protein, 23 aa, synthetic construct
  REGION 1..23: note = Description of Artificial Sequence: Synthetic peptide
  REGION 1..23: note = Synthetic Construct
  VARIANT 3: note = Glutamic acid or Glutamine
DIXMTQSPSSLTVTAGEKVTMSC

SEQ ID NO: 939 - protein, 19 aa, synthetic construct
  REGION 1..19: note = Description of Artificial Sequence: Synthetic peptide
  REGION 1..19: note = Synthetic Construct
TQSPSSLAVSVGEKVTMTC

SEQ ID NO: 940 - protein, 15 aa, synthetic construct
  REGION 1..15: note = Description of Artificial Sequence: Synthetic peptide
  REGION 1..15: note = Synthetic Construct
WYQLKQGKSPQLLVY

SEQ ID NO: 941 - protein, 15 aa, synthetic construct
  REGION 1..15: note = Description of Artificial Sequence: Synthetic peptide
  REGION 1..15: note = Synthetic Construct
WYQQKPGQSPKLLIY

SEQ ID NO: 942 - protein, 15 aa, synthetic construct
  REGION 1..15: note = Description of Artificial Sequence: Synthetic peptide
  REGION 1..15: note = Synthetic Construct
WLLQRPGQSPKRLIY

SEQ ID NO: 943 - protein, 15 aa, synthetic construct
  REGION 1..15: note = Description of Artificial Sequence: Synthetic peptide
  REGION 1..15: note = Synthetic Construct
WYQQKPRSSPKPWIY

SEQ ID NO: 944 - protein, 15 aa, synthetic construct
  REGION 1..15: note = Description of Artificial Sequence: Synthetic peptide
  REGION 1..15: note = Synthetic Construct
WYLQKPGQSPKLLIY

SEQ ID NO: 945 - protein, 15 aa, synthetic construct
  REGION 1..15: note = Description of Artificial Sequence: Synthetic peptide
  REGION 1..15: note = Synthetic Construct
WYLRKPGQSPKLLIY

SEQ ID NO: 946 - protein, 15 aa, synthetic construct
  REGION 1..15: note = Description of Artificial Sequence: Synthetic peptide
  REGION 1..15: note = Synthetic Construct
WYQQKQGKSPKLVVY

SEQ ID NO: 947 - protein, 15 aa, synthetic construct
  REGION 1..15: note = Description of Artificial Sequence: Synthetic peptide
  REGION 1..15: note = Synthetic Construct
WYQQKQGKSPQLLVY

SEQ ID NO: 948 - protein, 15 aa, synthetic construct
  REGION 1..15: note = Description of Artificial Sequence: Synthetic peptide
  REGION 1..15: note = Synthetic Construct
  VARIANT 2..3: note = Any Amino Acid
  VARIANT 4: note = Any naturally occurring amino acid
WXXXKPRSSPKPGIY

SEQ ID NO: 949 - protein, 15 aa, synthetic construct
  REGION 1..15: note = Description of Artificial Sequence: Synthetic peptide
  REGION 1..15: note = Synthetic Construct
  VARIANT 10: note = Glutamic acid or Glutamine
WYQQKPGQPXKLLIY

SEQ ID NO: 950 - protein, 32 aa, synthetic construct
  REGION 1..32: note = Description of Artificial Sequence: Synthetic polypeptide
  REGION 1..32: note = Synthetic Construct
GVPSRFSGSGSGTQFSLRINSLQPEDFGSYYC

SEQ ID NO: 951 - protein, 32 aa, synthetic construct
  REGION 1..32: note = Description of Artificial Sequence: Synthetic polypeptide
  REGION 1..32: note = Synthetic Construct
GVPDRFTGSGSGTDFTLTISSVKAEDLAVYYC

SEQ ID NO: 952 - protein, 32 aa, synthetic construct
  REGION 1..32: note = Description of Artificial Sequence: Synthetic polypeptide
  REGION 1..32: note = Synthetic Construct
GVPDRFAGSGSGTDFTLKISRLEADDLGIYYC

SEQ ID NO: 953 - protein, 32 aa, synthetic construct
  REGION 1..32: note = Description of Artificial Sequence: Synthetic polypeptide
  REGION 1..32: note = Synthetic Construct
GVPDRFTGSGSGTDFTLKISRVEAEDLGVYYC

SEQ ID NO: 954 - protein, 32 aa, synthetic construct
  REGION 1..32: note = Description of Artificial Sequence: Synthetic polypeptide
  REGION 1..32: note = Synthetic Construct
GVPARFSGSGSGTSYSLTINNMEAEDAATYYC

SEQ ID NO: 955 - protein, 32 aa, synthetic construct
  REGION 1..32: note = Description of Artificial Sequence: Synthetic polypeptide
  REGION 1..32: note = Synthetic Construct
GVPDRFSGSGSGTDFTLKISRVEAEDLGVYFC

SEQ ID NO: 956 - protein, 32 aa, synthetic construct
  REGION 1..32: note = Description of Artificial Sequence: Synthetic polypeptide
  REGION 1..32: note = Synthetic Construct
GVPARFSGSGSGTSYSLTISSMEAEDAATYYC

SEQ ID NO: 957 - protein, 32 aa, synthetic construct
  REGION 1..32: note = Description of Artificial Sequence: Synthetic polypeptide
  REGION 1..32: note = Synthetic Construct
GVPDRFSGSGSGTDFTLKISRVEAEDLGVYYC

SEQ ID NO: 958 - protein, 32 aa, synthetic construct
  REGION 1..32: note = Description of Artificial Sequence: Synthetic polypeptide
  REGION 1..32: note = Synthetic Construct
  VARIANT 17: note = Glutamic acid or Glutamine
GVPDRFAGSGSGTDFTXKISRLEADDLGIYYC

SEQ ID NO: 959 - protein, 32 aa, synthetic construct
  REGION 1..32: note = Description of Artificial Sequence: Synthetic polypeptide
  REGION 1..32: note = Synthetic Construct
GVPDRFTGSGSGTDFTLTISSVKAEDLAVYCC

SEQ ID NO: 960 - protein, 32 aa, synthetic construct
  REGION 1..32: note = Description of Artificial Sequence: Synthetic polypeptide
  REGION 1..32: note = Synthetic Construct
GVPDRFSGSGSGTDFTLKISRVEGEDLGVYYC

SEQ ID NO: 961 - protein, 32 aa, synthetic construct
  REGION 1..32: note = Description of Artificial Sequence: Synthetic polypeptide
  REGION 1..32: note = Synthetic Construct
  VARIANT 22: note = Glutamic acid or Glutamine
GVPSRFSGRGSGTQFFLKINSXQREDFGSYYC

SEQ ID NO: 962 - protein, 32 aa, synthetic construct
  REGION 1..32: note = Description of Artificial Sequence: Synthetic polypeptide
  REGION 1..32: note = Synthetic Construct
GVPSRFSASGSATQFSLKINSLQSADFGSYYC

SEQ ID NO: 963 - protein, 32 aa, synthetic construct
  REGION 1..32: note = Description of Artificial Sequence: Synthetic polypeptide
  REGION 1..32: note = Synthetic Construct
GVPDRFSGSGSGTDFTLKISRVEADDLGVYLC

SEQ ID NO: 964 - protein, 32 aa, synthetic construct
  REGION 1..32: note = Description of Artificial Sequence: Synthetic polypeptide
  REGION 1..32: note = Synthetic Construct
GVPDRFSGSGSGTDFTLRISGVEAEDLGVYFC

SEQ ID NO: 965 - protein, 33 aa, synthetic construct
  REGION 1..33: note = Description of Artificial Sequence: Synthetic polypeptide
  REGION 1..33: note = Synthetic Construct
  VARIANT 15: note = Any Amino Acid
GVPGRFSGSGSGTYXSFKISSMEGKMGPLIIFC

SEQ ID NO: 966 - protein, 32 aa, synthetic construct
  REGION 1..32: note = Description of Artificial Sequence: Synthetic polypeptide
  REGION 1..32: note = Synthetic Construct
  VARIANT 11: note = Glutamic acid or Glutamine
GVRDRFTGSGXGTDFTLTISSVQGEDLAIYYC

SEQ ID NO: 967 - protein, 32 aa, synthetic construct
  REGION 1..32: note = Description of Artificial Sequence: Synthetic polypeptide
  REGION 1..32: note = Synthetic Construct
GVPDRFTGSGSGTDFTLTISTVKAEDLAVYYC

SEQ ID NO: 968 - protein, 10 aa, synthetic construct
  REGION 1..10: note = Description of Artificial Sequence: Synthetic peptide
  REGION 1..10: note = Synthetic Construct
FGGGTKLEIK

SEQ ID NO: 969 - protein, 10 aa, synthetic construct
  REGION 1..10: note = Description of Artificial Sequence: Synthetic peptide
  REGION 1..10: note = Synthetic Construct
FGAGTKLELK

SEQ ID NO: 970 - protein, 10 aa, synthetic construct
  REGION 1..10: note = Description of Artificial Sequence: Synthetic peptide
  REGION 1..10: note = Synthetic Construct
FGGGTKLVIK

SEQ ID NO: 971 - protein, 10 aa, synthetic construct
  REGION 1..10: note = Description of Artificial Sequence: Synthetic peptide
  REGION 1..10: note = Synthetic Construct
FGGGTELEIK

SEQ ID NO: 972 - protein, 10 aa, synthetic construct
  REGION 1..10: note = Description of Artificial Sequence: Synthetic peptide
  REGION 1..10: note = Synthetic Construct
FGGGTKLEMK

SEQ ID NO: 973 - protein, 10 aa, synthetic construct
  REGION 1..10: note = Description of Artificial Sequence: Synthetic peptide
  REGION 1..10: note = Synthetic Construct
FGSGTKLEIK

SEQ ID NO: 974 - protein, 10 aa, synthetic construct
  REGION 1..10: note = Description of Artificial Sequence: Synthetic peptide
  REGION 1..10: note = Synthetic Construct
FGGGTKLEMN

SEQ ID NO: 975 - protein, 10 aa, synthetic construct
  REGION 1..10: note = Description of Artificial Sequence: Synthetic peptide
  REGION 1..10: note = Synthetic Construct
FGGGTKLEMK

SEQ ID NO: 976 - protein, 26 aa, synthetic construct
  REGION 1..26: note = Description of Artificial Sequence: Synthetic peptide
  REGION 1..26: note = Synthetic Construct
EVKLVESGGGLVKPGGSLKLSCAASG

SEQ ID NO: 977 - protein, 26 aa, synthetic construct
  REGION 1..26: note = Description of Artificial Sequence: Synthetic peptide
  REGION 1..26: note = Synthetic Construct
EVQLQQSGPELVKPGTSVKISCKTSG

SEQ ID NO: 978 - protein, 26 aa, synthetic construct
  REGION 1..26: note = Description of Artificial Sequence: Synthetic peptide
  REGION 1..26: note = Synthetic Construct
QVQLQQSGAELVRPGASVTLSCKASG

SEQ ID NO: 979 - protein, 26 aa, synthetic construct
  REGION 1..26: note = Description of Artificial Sequence: Synthetic peptide
  REGION 1..26: note = Synthetic Construct
EVKLEESGGGLVQPGGSMKLSCAASG

SEQ ID NO: 980 - protein, 26 aa, synthetic construct
  REGION 1..26: note = Description of Artificial Sequence: Synthetic peptide
  REGION 1..26: note = Synthetic Construct
EVQLVESGGGLVQPKGSLKLSCAASG

SEQ ID NO: 981 - protein, 26 aa, synthetic construct
  REGION 1..26: note = Description of Artificial Sequence: Synthetic peptide
  REGION 1..26: note = Synthetic Construct
QVQLQQSGAELVKPGASVKLSCKASG

SEQ ID NO: 982 - protein, 26 aa, synthetic construct
  REGION 1..26: note = Description of Artificial Sequence: Synthetic peptide
  REGION 1..26: note = Synthetic Construct
  VARIANT 1: note = Glutamic acid or Glutamine
XVQLVESGGGLVQPKGSLKLSCAASG

SEQ ID NO: 983 - protein, 26 aa, synthetic construct
  REGION 1..26: note = Description of Artificial Sequence: Synthetic peptide
  REGION 1..26: note = Synthetic Construct
QVQLQQSGAELVKPGASVKMSCKTSG

SEQ ID NO: 984 - protein, 26 aa, synthetic construct
  REGION 1..26: note = Description of Artificial Sequence: Synthetic peptide
  REGION 1..26: note = Synthetic Construct
  VARIANT 6..7: note = Glutamic acid or Glutamine
  VARIANT 11: note = Any naturally occurring amino acid
  VARIANT 18: note = Any Amino Acid
  VARIANT 19..20: note = Any naturally occurring amino acid
  VARIANT 24: note = Any naturally occurring amino acid
EVQLVXXGRGXSQGKGSXXXGRAXRC

SEQ ID NO: 985 - protein, 26 aa, synthetic construct
  REGION 1..26: note = Description of Artificial Sequence: Synthetic peptide
  REGION 1..26: note = Synthetic Construct
EVKLEESGGGLVQPGGSMKLSCTASG

SEQ ID NO: 986 - protein, 7 aa, synthetic construct
  REGION 1..7: note = Description of Artificial Sequence: Synthetic peptide
  REGION 1..7: note = Synthetic Construct
LSCAASG

SEQ ID NO: 987 - protein, 26 aa, synthetic construct
  REGION 1..26: note = Description of Artificial Sequence: Synthetic peptide
  REGION 1..26: note = Synthetic Construct
QVQLQQSGAVLVKPGASVKLSCKASG

SEQ ID NO: 988 - protein, 26 aa, synthetic construct
  REGION 1..26: note = Description of Artificial Sequence: Synthetic peptide
  REGION 1..26: note = Synthetic Construct
EVQLQQSGAELVKPGASVKISCKASG

SEQ ID NO: 989 - protein, 26 aa, synthetic construct
  REGION 1..26: note = Description of Artificial Sequence: Synthetic peptide
  REGION 1..26: note = Synthetic Construct
QVQLQQSGPELVKPGASLKISCKASG

SEQ ID NO: 990 - protein, 26 aa, synthetic construct
  REGION 1..26: note = Description of Artificial Sequence: Synthetic peptide
  REGION 1..26: note = Synthetic Construct
EVQLVESGGGLVQPKGSLKLSCAAFG

SEQ ID NO: 991 - protein, 26 aa, synthetic construct
  REGION 1..26: note = Description of Artificial Sequence: Synthetic peptide
  REGION 1..26: note = Synthetic Construct
QVQLQQSGAEVVKPGASVKMSCKTSG

SEQ ID NO: 992 - protein, 26 aa, synthetic construct
  REGION 1..26: note = Description of Artificial Sequence: Synthetic peptide
  REGION 1..26: note = Synthetic Construct
EVQLVESGGRLVQPKGSLKLSCAASG

SEQ ID NO: 993 - protein, 26 aa, synthetic construct
  REGION 1..26: note = Description of Artificial Sequence: Synthetic peptide
  REGION 1..26: note = Synthetic Construct
QVQLQQYGPELVKPGASVKMSCKVSG

SEQ ID NO: 994 - protein, 18 aa, synthetic construct
  REGION 1..18: note = Description of Artificial Sequence: Synthetic peptide
  REGION 1..18: note = Synthetic Construct
WRIGQGKGSLKLARAARG

SEQ ID NO: 995 - protein, 12 aa, synthetic construct
  REGION 1..12: note = Description of Artificial Sequence: Synthetic peptide
  REGION 1..12: note = Synthetic Construct
WVRQTPEKRLEW

SEQ ID NO: 996 - protein, 12 aa, synthetic construct
  REGION 1..12: note = Description of Artificial Sequence: Synthetic peptide
  REGION 1..12: note = Synthetic Construct
WVKQSHGKSLEW

SEQ ID NO: 997 - protein, 12 aa, synthetic construct
  REGION 1..12: note = Description of Artificial Sequence: Synthetic peptide
  REGION 1..12: note = Synthetic Construct
WVKQTPVHGLEW

SEQ ID NO: 998 - protein, 12 aa, synthetic construct
  REGION 1..12: note = Description of Artificial Sequence: Synthetic peptide
  REGION 1..12: note = Synthetic Construct
WVRQSPEKGLEW

SEQ ID NO: 999 - protein, 12 aa, synthetic construct
  REGION 1..12: note = Description of Artificial Sequence: Synthetic peptide
  REGION 1..12: note = Synthetic Construct
WVRQAPGKGLEW

SEQ ID NO: 1000 - protein, 12 aa, synthetic construct
  REGION 1..12: note = Description of Artificial Sequence: Synthetic peptide
  REGION 1..12: note = Synthetic Construct
WVKQRPGRGLEW

SEQ ID NO: 1001 - protein, 12 aa, synthetic construct
  REGION 1..12: note = Description of Artificial Sequence: Synthetic peptide
  REGION 1..12: note = Synthetic Construct
WVKQRPGQGLVW

SEQ ID NO: 1002 - protein, 12 aa, synthetic construct
  REGION 1..12: note = Description of Artificial Sequence: Synthetic peptide
  REGION 1..12: note = Synthetic Construct
GVPQGPGKGREW

SEQ ID NO: 1003 - protein, 12 aa, synthetic construct
  REGION 1..12: note = Description of Artificial Sequence: Synthetic peptide
  REGION 1..12: note = Synthetic Construct
WVKQRPGRGPEW

SEQ ID NO: 1004 - protein, 12 aa, synthetic construct
  REGION 1..12: note = Description of Artificial Sequence: Synthetic peptide
  REGION 1..12: note = Synthetic Construct
WVKQRPGKGLEW

SEQ ID NO: 1005 - protein, 12 aa, synthetic construct
  REGION 1..12: note = Description of Artificial Sequence: Synthetic peptide
  REGION 1..12: note = Synthetic Construct
WVRQTPGKGLEW

SEQ ID NO: 1006 - protein, 12 aa, synthetic construct
  REGION 1..12: note = Description of Artificial Sequence: Synthetic peptide
  REGION 1..12: note = Synthetic Construct
WMKQSHGKSLEW

SEQ ID NO: 1007 - protein, 12 aa, synthetic construct
  REGION 1..12: note = Description of Artificial Sequence: Synthetic peptide
  REGION 1..12: note = Synthetic Construct
RVRQGPGKGREW

SEQ ID NO: 1008 - protein, 35 aa, synthetic construct
  REGION 1..35: note = Description of Artificial Sequence: Synthetic polypeptide
  REGION 1..35: note = Synthetic Construct
DSVQGRFTFSRDNARNILYLQMSSLRSEDTAMYYC

SEQ ID NO: 1009 - protein, 35 aa, synthetic construct
  REGION 1..35: note = Description of Artificial Sequence: Synthetic polypeptide
  REGION 1..35: note = Synthetic Construct
QKFKGKASLTVDKSSSTAYMELHSLASDDSAVYYC

SEQ ID NO: 1010 - protein, 35 aa, synthetic construct
  REGION 1..35: note = Description of Artificial Sequence: Synthetic polypeptide
  REGION 1..35: note = Synthetic Construct
QKFKGKAILTADKSSSTAYMELRSLTSEDSAVYYC

SEQ ID NO: 1011 - protein, 35 aa, synthetic construct
  REGION 1..35: note = Description of Artificial Sequence: Synthetic polypeptide
  REGION 1..35: note = Synthetic Construct
ESVKGRFTISRDDSKSTVYLQMNTLRADDTGIYYC

SEQ ID NO: 1012 - protein, 35 aa, synthetic construct
  REGION 1..35: note = Description of Artificial Sequence: Synthetic polypeptide
  REGION 1..35: note = Synthetic Construct
DSVKDRITCSRDDSENMFYLQLSSLKTEDTAMYYC

SEQ ID NO: 1013 - protein, 35 aa, synthetic construct
  REGION 1..35: note = Description of Artificial Sequence: Synthetic polypeptide
  REGION 1..35: note = Synthetic Construct
EKFKTKATLTVDKPSSTAYMQVSSLTSEDSAVYYC

SEQ ID NO: 1014 - protein, 35 aa, synthetic construct
  REGION 1..35: note = Description of Artificial Sequence: Synthetic polypeptide
  REGION 1..35: note = Synthetic Construct
DSVKDRFTCSRDDSENMFYLQLSSLKTEDTAIYYC

SEQ ID NO: 1015 - protein, 35 aa, synthetic construct
  REGION 1..35: note = Description of Artificial Sequence: Synthetic polypeptide
  REGION 1..35: note = Synthetic Construct
DSVKDRFTCSRDDSENMFYLQLSSLKTEDTAMYYC

SEQ ID NO: 1016 - protein, 35 aa, synthetic construct
  REGION 1..35: note = Description of Artificial Sequence: Synthetic polypeptide
  REGION 1..35: note = Synthetic Construct
EKFKTKATLTVDTSSSTAYMHLSSLTSEDSAVYFC

SEQ ID NO: 1017 - protein, 35 aa, synthetic construct
  REGION 1..35: note = Description of Artificial Sequence: Synthetic polypeptide
  REGION 1..35: note = Synthetic Construct
  VARIANT 9: note = Glutamic acid or Glutamine
  VARIANT 20: note = Glutamic acid or Glutamine
  VARIANT 24..25: note = Any naturally occurring amino acid
  VARIANT 27: note = Any naturally occurring amino acid
  VARIANT 35: note = Any naturally occurring amino acid
DSVKDRFTXSRDDSESLFYXQMSXXKXEDTAMYYX

SEQ ID NO: 1018 - protein, 35 aa, synthetic construct
  REGION 1..35: note = Description of Artificial Sequence: Synthetic polypeptide
  REGION 1..35: note = Synthetic Construct
ESVKGRFTISRDDSKSTVYLQMNSLRTEDTGIYYC

SEQ ID NO: 1019 - protein, 35 aa, synthetic construct
  REGION 1..35: note = Description of Artificial Sequence: Synthetic polypeptide
  REGION 1..35: note = Synthetic Construct
  VARIANT 23: note = Glutamic acid or Glutamine
DSVKDRFTISRDDSESMLYLQMXNLKTEDTAMYYC

SEQ ID NO: 1020 - protein, 35 aa, synthetic construct
  REGION 1..35: note = Description of Artificial Sequence: Synthetic polypeptide
  REGION 1..35: note = Synthetic Construct
  VARIANT 30: note = Glutamic acid or Glutamine
EKFRNKAILTVDKPSSTAYMQLNSLTSEDXAVYYC

SEQ ID NO: 1021 - protein, 35 aa, synthetic construct
  REGION 1..35: note = Description of Artificial Sequence: Synthetic polypeptide
  REGION 1..35: note = Synthetic Construct
GKFEGKATLTADKSSSTAYMQLSSLTSEDSAVYFC

SEQ ID NO: 1022 - protein, 35 aa, synthetic construct
  REGION 1..35: note = Description of Artificial Sequence: Synthetic polypeptide
  REGION 1..35: note = Synthetic Construct
GEFRVRATLTADTSSTTAYMQLSSLTSEDSAVYFC

SEQ ID NO: 1023 - protein, 35 aa, synthetic construct
  REGION 1..35: note = Description of Artificial Sequence: Synthetic polypeptide
  REGION 1..35: note = Synthetic Construct
EKFKTKATLTVDKPSSTADMQLSSLTSEDSAVYYC

SEQ ID NO: 1024 - protein, 35 aa, synthetic construct
  REGION 1..35: note = Description of Artificial Sequence: Synthetic polypeptide
  REGION 1..35: note = Synthetic Construct
DSVKDRFTISRDDSESIVYVQMNNLKTEDTGMYSC

SEQ ID NO: 1025 - protein, 35 aa, synthetic construct
  REGION 1..35: note = Description of Artificial Sequence: Synthetic polypeptide
  REGION 1..35: note = Synthetic Construct
ERFKTKATLTVDTSSSTAYMHLSSLTSEDSAVYFC

SEQ ID NO: 1026 - protein, 35 aa, synthetic construct
  REGION 1..35: note = Description of Artificial Sequence: Synthetic polypeptide
  REGION 1..35: note = Synthetic Construct
DSVKDRFTISRDDSESMLYLQMNNLKTEDTAMYYC

SEQ ID NO: 1027 - protein, 35 aa, synthetic construct
  REGION 1..35: note = Description of Artificial Sequence: Synthetic polypeptide
  REGION 1..35: note = Synthetic Construct
  VARIANT 34: note = Glutamic acid or Glutamine
QEFKGKATLTVDKSSSTAYMELRSLTFEDSAVYXC

SEQ ID NO: 1028 - protein, 35 aa, synthetic construct
  REGION 1..35: note = Description of Artificial Sequence: Synthetic polypeptide
  REGION 1..35: note = Synthetic Construct
DSVKDRFRASRDDSESMLYVQMSNWKQEDTAMYYG

SEQ ID NO: 1029 - protein, 11 aa, synthetic construct
  REGION 1..11: note = Description of Artificial Sequence: Synthetic peptide
  REGION 1..11: note = Synthetic Construct
WGQGTLVTVSA

SEQ ID NO: 1030 - protein, 11 aa, synthetic construct
  REGION 1..11: note = Description of Artificial Sequence: Synthetic peptide
  REGION 1..11: note = Synthetic Construct
WGQGTSVTVSS

SEQ ID NO: 1031 - protein, 11 aa, synthetic construct
  REGION 1..11: note = Description of Artificial Sequence: Synthetic peptide
  REGION 1..11: note = Synthetic Construct
WGQGTTLTVSS

SEQ ID NO: 1032 - protein, 11 aa, synthetic construct
  REGION 1..11: note = Description of Artificial Sequence: Synthetic peptide
  REGION 1..11: note = Synthetic Construct
WGTGTTVTVST

SEQ ID NO: 1033 - protein, 11 aa, synthetic construct
  REGION 1..11: note = Description of Artificial Sequence: Synthetic peptide
  REGION 1..11: note = Synthetic Construct
WGTGTTVTVSS

SEQ ID NO: 1034 - protein, 11 aa, synthetic construct
  REGION 1..11: note = Description of Artificial Sequence: Synthetic peptide
  REGION 1..11: note = Synthetic Construct
WGQGTLVTVST

SEQ ID NO: 1035 - protein, 10 aa, synthetic construct
  REGION 1..10: note = Description of Artificial Sequence: Synthetic peptide
  REGION 1..10: note = Synthetic Construct
WGQGTIVTVS

SEQ ID NO: 1036 - protein, 11 aa, synthetic construct
  REGION 1..11: note = Description of Artificial Sequence: Synthetic peptide
  REGION 1..11: note = Synthetic Construct
WGQGASVTVSS

SEQ ID NO: 1037 - protein, 7 aa, synthetic construct
  REGION 1..7: note = Description of Artificial Sequence: Synthetic peptide
  REGION 1..7: note = Synthetic Construct
WGRGTLV

SEQ ID NO: 1038 - protein, 5 aa, synthetic construct
  REGION 1..5: note = Description of Artificial Sequence: Synthetic peptide
  REGION 1..5: note = Synthetic Construct
WGQGT

SEQ ID NO: 1039 - protein, 108 aa, synthetic construct
  REGION 1..108: note = Description of Artificial Sequence: Synthetic polypeptide
  REGION 1..108: note = Synthetic Construct
  VARIANT 3: note = Glutamic acid or Glutamine
DIXVTQSPASLSASVGETVTITCRASENIYSFLAWYQLKQGKSPQLLVYNSKTFAEGVPSRFSGSGSGTQFSLRINSLQPEDFGSYYCQHHYGTPPWTFGGGTKLEIK

SEQ ID NO: 1040 - protein, 108 aa, synthetic construct
  REGION 1..108: note = Description of Artificial Sequence: Synthetic polypeptide
  REGION 1..108: note = Synthetic Construct
EIVMTQSPATLSVSPGERATLSCRASENIYSFLAWYQQKPGQAPRLLIYNSKTFAEGIPARFSGSGSGTEFTLTISSLQSEDFAVYYCQHHYGTPPWTFGQGTKVEIK

SEQ ID NO: 1041 - protein, 108 aa, synthetic construct
  REGION 1..108: note = Description of Artificial Sequence: Synthetic polypeptide
  REGION 1..108: note = Synthetic Construct
DIQLTQSPSFLSASVGDRVTITCRASENIYSFLAWYQQKPGKAPKLLIYNSKTFAEGVPSRFSGSGSGTEFTLTISSLQPEDFATYYCQHHYGTPPWTFGQGTKVEIK

SEQ ID NO: 1042 - protein, 108 aa, synthetic construct
  REGION 1..108: note = Description of Artificial Sequence: Synthetic polypeptide
  REGION 1..108: note = Synthetic Construct
EIVLTQSPATLSLSPGERATLSCRASENIYSFLAWYQQKPGQAPRLLIYNSKTFAEGIPARFSGSGSGTDFTLTISSLEPEDFAVYYCQHHYGTPPWTFGQGTKVEIK

SEQ ID NO: 1043 - protein, 108 aa, synthetic construct
  REGION 1..108: note = Description of Artificial Sequence: Synthetic polypeptide
  REGION 1..108: note = Synthetic Construct
DIQMTQSPSTLSASVGDRVTITCRASENIYSFLAWYQQKPGKAPKLLIYNSKTFAEGVPSRFSGSGSGTEFTLTISSLQPDDFATYYCQHHYGTPPWTFGQGTKVEIK

SEQ ID NO: 1044 - protein, 108 aa, synthetic construct
  REGION 1..108: note = Description of Artificial Sequence: Synthetic polypeptide
  REGION 1..108: note = Synthetic Construct
DIQMTQSPSSLSASVGDRVTITCRASENIYSFLAWYQQKPGKAPKLLIYNSKTFAEGVPSRFSGSGSGTDFTLTISSLQPEDFATYYCQHHYGTPPWTFGQGTKVEIK

SEQ ID NO: 1045 - protein, 108 aa, synthetic construct
  REGION 1..108: note = Description of Artificial Sequence: Synthetic polypeptide
  REGION 1..108: note = Synthetic Construct
DIQMTQSPSSLSASVGDRVTITCRASENIYSFLAWYQQKPGKAPKLLIYNSKTFAEGVPSRFSGSGSGTDFTFTISSLQPEDIATYYCQHHYGTPPWTFGQGTKVEIK

SEQ ID NO: 1046 - protein, 108 aa, synthetic construct
  REGION 1..108: note = Description of Artificial Sequence: Synthetic polypeptide
  REGION 1..108: note = Synthetic Construct
EIVLTQSPGTLSLSPGERATLSCRASENIYSFLAWYQQKPGQAPRLLIYNSKTFAEGIPDRFSGSGSGTDFTLTISRLEPEDFAVYYCQHHYGTPPWTFGQGTKVEIK

SEQ ID NO: 1047 - protein, 108 aa, synthetic construct
  REGION 1..108: note = Description of Artificial Sequence: Synthetic polypeptide
  REGION 1..108: note = Synthetic Construct
DIVMTQSPLSLPVTPGEPASISCRASENIYSFLAWYLQKPGQSPQLLIYNSKTFAEGVPDRFSGSGSGTDFTLKISRVEAEDVGVYYCQHHYGTPPWTFGQGTKVEIK

SEQ ID NO: 1048 - protein, 108 aa, synthetic construct
  REGION 1..108: note = Description of Artificial Sequence: Synthetic polypeptide
  REGION 1..108: note = Synthetic Construct
DVVMTQSPLSLPVTLGQPASISCRASENIYSFLAWFQQRPGQSPRRLIYNSKTFAEGVPDRFSGSGSGTDFTLKISRVEAEDVGVYYCQHHYGTPPWTFGQGTKVEIK

SEQ ID NO: 1049 - protein, 108 aa, synthetic construct
  REGION 1..108: note = Description of Artificial Sequence: Synthetic polypeptide
  REGION 1..108: note = Synthetic Construct
DIVMTQSPDSLAVSLGERATINCRASENIYSFLAWYQQKPGQPPKLLIYNSKTFAEGVPDRFSGSGSGTDFTLTISSLQAEDVAVYYCQHHYGTPPWTFGQGTKVEIK

SEQ ID NO: 1050 - protein, 111 aa, synthetic construct
  REGION 1..111: note = Description of Artificial Sequence: Synthetic polypeptide
  REGION 1..111: note = Synthetic Construct
TMSQSPSSLAVSVGEKVTMSCKSSQSLLYSSNQKNCLAWYQQKPGQSPKLLIYWAFTRESGVPDRFTGSGSGTDFTLTISSVKAEDLAVYYCQQYYSYPLTFGAGTKLELK

SEQ ID NO: 1051 - protein, 113 aa, synthetic construct
  REGION 1..113: note = Description of Artificial Sequence: Synthetic polypeptide
  REGION 1..113: note = Synthetic Construct
DIVMTQSPDSLAVSLGERATINCKSSQSLLYSSNQKNCLAWYQQKPGQPPKLLIYWAFTRESGVPDRFSGSGSGTDFTLTISSLQAEDVAVYYCQQYYSYPLTFGQGTKVEIK

SEQ ID NO: 1052 - protein, 113 aa, synthetic construct
  REGION 1..113: note = Description of Artificial Sequence: Synthetic polypeptide
  REGION 1..113: note = Synthetic Construct
DVVMTQSPLSLPVTLGQPASISCKSSQSLLYSSNQKNCLAWFQQRPGQSPRRLIYWAFTRESGVPDRFSGSGSGTDFTLKISRVEAEDVGVYYCQQYYSYPLTFGQGTKVEIK

SEQ ID NO: 1053 - protein, 113 aa, synthetic construct
  REGION 1..113: note = Description of Artificial Sequence: Synthetic polypeptide
  REGION 1..113: note = Synthetic Construct
DIVMTQSPLSLPVTPGEPASISCKSSQSLLYSSNQKNCLAWYLQKPGQSPQLLIYWAFTRESGVPDRFSGSGSGTDFTLKISRVEAEDVGVYYCQQYYSYPLTFGQGTKVEIK

SEQ ID NO: 1054 - protein, 113 aa, synthetic construct
  REGION 1..113: note = Description of Artificial Sequence: Synthetic polypeptide
  REGION 1..113: note = Synthetic Construct
DIQLTQSPSFLSASVGDRVTITCKSSQSLLYSSNQKNCLAWYQQKPGKAPKLLIYWAFTRESGVPSRFSGSGSGTEFTLTISSLQPEDFATYYCQQYYSYPLTFGQGTKVEIK

SEQ ID NO: 1055 - protein, 113 aa, synthetic construct
  REGION 1..113: note = Description of Artificial Sequence: Synthetic polypeptide
  REGION 1..113: note = Synthetic Construct
DIQMTQSPSTLSASVGDRVTITCKSSQSLLYSSNQKNCLAWYQQKPGKAPKLLIYWAFTRESGVPSRFSGSGSGTEFTLTISSLQPDDFATYYCQQYYSYPLTFGQGTKVEIK

SEQ ID NO: 1056 - protein, 113 aa, synthetic construct
  REGION 1..113: note = Description of Artificial Sequence: Synthetic polypeptide
  REGION 1..113: note = Synthetic Construct
EIVMTQSPATLSVSPGERATLSCKSSQSLLYSSNQKNCLAWYQQKPGQAPRLLIYWAFTRESGIPARFSGSGSGTEFTLTISSLQSEDFAVYYCQQYYSYPLTFGQGTKVEIK

SEQ ID NO: 1057 - protein, 113 aa, synthetic construct
  REGION 1..113: note = Description of Artificial Sequence: Synthetic polypeptide
  REGION 1..113: note = Synthetic Construct
DIQMTQSPSSLSASVGDRVTITCKSSQSLLYSSNQKNCLAWYQQKPGKAPKLLIYWAFTRESGVPSRFSGSGSGTDFTFTISSLQPEDIATYYCQQYYSYPLTFGQGTKVEIK

SEQ ID NO: 1058 - protein, 113 aa, synthetic construct
  REGION 1..113: note = Description of Artificial Sequence: Synthetic polypeptide
  REGION 1..113: note = Synthetic Construct
DIQMTQSPSSLSASVGDRVTITCKSSQSLLYSSNQKNCLAWYQQKPGKAPKLLIYWAFTRESGVPSRFSGSGSGTDFTLTISSLQPEDFATYYCQQYYSYPLTFGQGTKVEIK

SEQ ID NO: 1059 - protein, 113 aa, synthetic construct
  REGION 1..113: note = Description of Artificial Sequence: Synthetic polypeptide
  REGION 1..113: note = Synthetic Construct
EIVLTQSPATLSLSPGERATLSCKSSQSLLYSSNQKNCLAWYQQKPGQAPRLLIYWAFTRESGIPARFSGSGSGTDFTLTISSLEPEDFAVYYCQQYYSYPLTFGQGTKVEIK

SEQ ID NO: 1060 - protein, 113 aa, synthetic construct
  REGION 1..113: note = Description of Artificial Sequence: Synthetic polypeptide
  REGION 1..113: note = Synthetic Construct
EIVLTQSPGTLSLSPGERATLSCKSSQSLLYSSNQKNCLAWYQQKPGQAPRLLIYWAFTRESGIPDRFSGSGSGTDFTLTISRLEPEDFAVYYCQQYYSYPLTFGQGTKVEIK

SEQ ID NO: 1061 - protein, 112 aa, synthetic construct
  REGION 1..112: note = Description of Artificial Sequence: Synthetic polypeptide
  REGION 1..112: note = Synthetic Construct
  VARIANT 3: note = Glutamic acid or Glutamine
DVXMTQTPLTLSVTIGQPASISCKSSQSLLYSNGKTFLSWLLQRPGQSPKRLIYLVSKLDSGVPDRFAGSGSGTDFTLKISRLEADDLGIYYCMQGTHFPLTFGAGTKLELK

SEQ ID NO: 1062 - protein, 112 aa, synthetic construct
  REGION 1..112: note = Description of Artificial Sequence: Synthetic polypeptide
  REGION 1..112: note = Synthetic Construct
DVVMTQSPLSLPVTLGQPASISCKSSQSLLYSNGKTFLSWFQQRPGQSPRRLIYLVSKLDSGVPDRFSGSGSGTDFTLKISRVEAEDVGVYYCMQGTHFPLTFGQGTKVEIK

SEQ ID NO: 1063 - protein, 112 aa, synthetic construct
  REGION 1..112: note = Description of Artificial Sequence: Synthetic polypeptide
  REGION 1..112: note = Synthetic Construct
DIVMTQSPLSLPVTPGEPASISCKSSQSLLYSNGKTFLSWYLQKPGQSPQLLIYLVSKLDSGVPDRFSGSGSGTDFTLKISRVEAEDVGVYYCMQGTHFPLTFGQGTKVEIK

SEQ ID NO: 1064 - protein, 112 aa, synthetic construct
  REGION 1..112: note = Description of Artificial Sequence: Synthetic polypeptide
  REGION 1..112: note = Synthetic Construct
DIVMTQSPDSLAVSLGERATINCKSSQSLLYSNGKTFLSWYQQKPGQPPKLLIYLVSKLDSGVPDRFSGSGSGTDFTLTISSLQAEDVAVYYCMQGTHFPLTFGQGTKVEIK

SEQ ID NO: 1065 - protein, 112 aa, synthetic construct
  REGION 1..112: note = Description of Artificial Sequence: Synthetic polypeptide
  REGION 1..112: note = Synthetic Construct
DIQMTQSPSTLSASVGDRVTITCKSSQSLLYSNGKTFLSWYQQKPGKAPKLLIYLVSKLDSGVPSRFSGSGSGTEFTLTISSLQPDDFATYYCMQGTHFPLTFGQGTKVEIK

SEQ ID NO: 1066 - protein, 112 aa, synthetic construct
  REGION 1..112: note = Description of Artificial Sequence: Synthetic polypeptide
  REGION 1..112: note = Synthetic Construct
DIQLTQSPSFLSASVGDRVTITCKSSQSLLYSNGKTFLSWYQQKPGKAPKLLIYLVSKLDSGVPSRFSGSGSGTEFTLTISSLQPEDFATYYCMQGTHFPLTFGQGTKVEIK

SEQ ID NO: 1067 - protein, 112 aa, synthetic construct
  REGION 1..112: note = Description of Artificial Sequence: Synthetic polypeptide
  REGION 1..112: note = Synthetic Construct
DIQMTQSPSSLSASVGDRVTITCKSSQSLLYSNGKTFLSWYQQKPGKAPKLLIYLVSKLDSGVPSRFSGSGSGTDFTLTISSLQPEDFATYYCMQGTHFPLTFGQGTKVEIK

SEQ ID NO: 1068 - protein, 112 aa, synthetic construct
  REGION 1..112: note = Description of Artificial Sequence: Synthetic polypeptide
  REGION 1..112: note = Synthetic Construct
DIQMTQSPSSLSASVGDRVTITCKSSQSLLYSNGKTFLSWYQQKPGKAPKLLIYLVSKLDSGVPSRFSGSGSGTDFTFTISSLQPEDIATYYCMQGTHFPLTFGQGTKVEIK

SEQ ID NO: 1069 - protein, 112 aa, synthetic construct
  REGION 1..112: note = Description of Artificial Sequence: Synthetic polypeptide
  REGION 1..112: note = Synthetic Construct
EIVMTQSPATLSVSPGERATLSCKSSQSLLYSNGKTFLSWYQQKPGQAPRLLIYLVSKLDSGIPARFSGSGSGTEFTLTISSLQSEDFAVYYCMQGTHFPLTFGQGTKVEIK

SEQ ID NO: 1070 - protein, 112 aa, synthetic construct
  REGION 1..112: note = Description of Artificial Sequence: Synthetic polypeptide
  REGION 1..112: note = Synthetic Construct
EIVLTQSPATLSLSPGERATLSCKSSQSLLYSNGKTFLSWYQQKPGQAPRLLIYLVSKLDSGIPARFSGSGSGTDFTLTISSLEPEDFAVYYCMQGTHFPLTFGQGTKVEIK

SEQ ID NO: 1071 - protein, 112 aa, synthetic construct
  REGION 1..112: note = Description of Artificial Sequence: Synthetic polypeptide
  REGION 1..112: note = Synthetic Construct
EIVLTQSPGTLSLSPGERATLSCKSSQSLLYSNGKTFLSWYQQKPGQAPRLLIYLVSKLDSGIPDRFSGSGSGTDFTLTISRLEPEDFAVYYCMQGTHFPLTFGQGTKVEIK

SEQ ID NO: 1072 - protein, 112 aa, synthetic construct
  REGION 1..112: note = Description of Artificial Sequence: Synthetic polypeptide
  REGION 1..112: note = Synthetic Construct
  VARIANT 3: note = Glutamic acid or Glutamine
DVXMTQTPLTLSVTIGQPASISCKSSQSLLDSDGKTYLNWLLQRPGQSPKRLIYLVSKLDSGVPDRFTGSGSGTDFTLKISRVEAEDLGVYYCWQGTHFPYTFGGGTKLEIK

SEQ ID NO: 1073 - protein, 112 aa, synthetic construct
  REGION 1..112: note = Description of Artificial Sequence: Synthetic polypeptide
  REGION 1..112: note = Synthetic Construct
DVVMTQSPLSLPVTLGQPASISCKSSQSLLDSDGKTYLNWFQQRPGQSPRRLIYLVSKLDSGVPDRFSGSGSGTDFTLKISRVEAEDVGVYYCWQGTHFPYTFGQGTKVEIK

SEQ ID NO: 1074 - protein, 112 aa, synthetic construct
  REGION 1..112: note = Description of Artificial Sequence: Synthetic polypeptide
  REGION 1..112: note = Synthetic Construct
DIVMTQSPLSLPVTPGEPASISCKSSQSLLDSDGKTYLNWYLQKPGQSPQLLIYLVSKLDSGVPDRFSGSGSGTDFTLKISRVEAEDVGVYYCWQGTHFPYTFGQGTKVEIK

SEQ ID NO: 1075 - protein, 112 aa, synthetic construct
  REGION 1..112: note = Description of Artificial Sequence: Synthetic polypeptide
  REGION 1..112: note = Synthetic Construct
DIVMTQSPDSLAVSLGERATINCKSSQSLLDSDGKTYLNWYQQKPGQPPKLLIYLVSKLDSGVPDRFSGSGSGTDFTLTISSLQAEDVAVYYCWQGTHFPYTFGQGTKVEIK

SEQ ID NO: 1076 - protein, 112 aa, synthetic construct
  REGION 1..112: note = Description of Artificial Sequence: Synthetic polypeptide
  REGION 1..112: note = Synthetic Construct
DIQLTQSPSFLSASVGDRVTITCKSSQSLLDSDGKTYLNWYQQKPGKAPKLLIYLVSKLDSGVPSRFSGSGSGTEFTLTISSLQPEDFATYYCWQGTHFPYTFGQGTKVEIK

SEQ ID NO: 1077 - protein, 112 aa, synthetic construct
  REGION 1..112: note = Description of Artificial Sequence: Synthetic polypeptide
  REGION 1..112: note = Synthetic Construct
DIQMTQSPSTLSASVGDRVTITCKSSQSLLDSDGKTYLNWYQQKPGKAPKLLIYLVSKLDSGVPSRFSGSGSGTEFTLTISSLQPDDFATYYCWQGTHFPYTFGQGTKVEIK

SEQ ID NO: 1078 - protein, 112 aa, synthetic construct
  REGION 1..112: note = Description of Artificial Sequence: Synthetic polypeptide
  REGION 1..112: note = Synthetic Construct
DIQMTQSPSSLSASVGDRVTITCKSSQSLLDSDGKTYLNWYQQKPGKAPKLLIYLVSKLDSGVPSRFSGSGSGTDFTLTISSLQPEDFATYYCWQGTHFPYTFGQGTKVEIK

SEQ ID NO: 1079 - protein, 112 aa, synthetic construct
  REGION 1..112: note = Description of Artificial Sequence: Synthetic polypeptide
  REGION 1..112: note = Synthetic Construct
DIQMTQSPSSLSASVGDRVTITCKSSQSLLDSDGKTYLNWYQQKPGKAPKLLIYLVSKLDSGVPSRFSGSGSGTDFTFTISSLQPEDIATYYCWQGTHFPYTFGQGTKVEIK

SEQ ID NO: 1080 - protein, 112 aa, synthetic construct
  REGION 1..112: note = Description of Artificial Sequence: Synthetic polypeptide
  REGION 1..112: note = Synthetic Construct
EIVLTQSPATLSLSPGERATLSCKSSQSLLDSDGKTYLNWYQQKPGQAPRLLIYLVSKLDSGIPARFSGSGSGTDFTLTISSLEPEDFAVYYCWQGTHFPYTFGQGTKVEIK

SEQ ID NO: 1081 - protein, 112 aa, synthetic construct
  REGION 1..112: note = Description of Artificial Sequence: Synthetic polypeptide
  REGION 1..112: note = Synthetic Construct
EIVMTQSPATLSVSPGERATLSCKSSQSLLDSDGKTYLNWYQQKPGQAPRLLIYLVSKLDSGIPARFSGSGSGTEFTLTISSLQSEDFAVYYCWQGTHFPYTFGQGTKVEIK

SEQ ID NO: 1082 - protein, 112 aa, synthetic construct
  REGION 1..112: note = Description of Artificial Sequence: Synthetic polypeptide
  REGION 1..112: note = Synthetic Construct
EIVLTQSPGTLSLSPGERATLSCKSSQSLLDSDGKTYLNWYQQKPGQAPRLLIYLVSKLDSGIPDRFSGSGSGTDFTLTISRLEPEDFAVYYCWQGTHFPYTFGQGTKVEIK

SEQ ID NO: 1083 - protein, 104 aa, synthetic construct
  REGION 1..104: note = Description of Artificial Sequence: Synthetic polypeptide
  REGION 1..104: note = Synthetic Construct
VLTQSPALMSASPGEKVTMTCSASSSVSYMYWYQQKPRSSPKPWIYLTSILASGVPARFSGSGSGTSYSLTINNMEAEDAATYYCQQWSFNPYTFGGGTKLVIK

SEQ ID NO: 1084 - protein, 106 aa, synthetic construct
  REGION 1..106: note = Description of Artificial Sequence: Synthetic polypeptide
  REGION 1..106: note = Synthetic Construct
EIVLTQSPATLSLSPGERATLSCSASSSVSYMYWYQQKPGQAPRLLIYLTSILASGIPARFSGSGSGTDFTLTISSLEPEDFAVYYCQQWSFNPYTFGQGTKVEIK

SEQ ID NO: 1085 - protein, 106 aa, synthetic construct
  REGION 1..106: note = Description of Artificial Sequence: Synthetic polypeptide
  REGION 1..106: note = Synthetic Construct
DIQMTQSPSSLSASVGDRVTITCSASSSVSYMYWYQQKPGKAPKLLIYLTSILASGVPSRFSGSGSGTDFTLTISSLQPEDFATYYCQQWSFNPYTFGQGTKVEIK

SEQ ID NO: 1086 - protein, 106 aa, synthetic construct
  REGION 1..106: note = Description of Artificial Sequence: Synthetic polypeptide
  REGION 1..106: note = Synthetic Construct
DIQMTQSPSTLSASVGDRVTITCSASSSVSYMYWYQQKPGKAPKLLIYLTSILASGVPSRFSGSGSGTEFTLTISSLQPDDFATYYCQQWSFNPYTFGQGTKVEIK

SEQ ID NO: 1087 - protein, 106 aa, synthetic construct
  REGION 1..106: note = Description of Artificial Sequence: Synthetic polypeptide
  REGION 1..106: note = Synthetic Construct
EIVMTQSPATLSVSPGERATLSCSASSSVSYMYWYQQKPGQAPRLLIYLTSILASGIPARFSGSGSGTEFTLTISSLQSEDFAVYYCQQWSFNPYTFGQGTKVEIK

SEQ ID NO: 1088 - protein, 106 aa, synthetic construct
  REGION 1..106: note = Description of Artificial Sequence: Synthetic polypeptide
  REGION 1..106: note = Synthetic Construct
DIQLTQSPSFLSASVGDRVTITCSASSSVSYMYWYQQKPGKAPKLLIYLTSILASGVPSRFSGSGSGTEFTLTISSLQPEDFATYYCQQWSFNPYTFGQGTKVEIK

SEQ ID NO: 1089 - protein, 106 aa, synthetic construct
  REGION 1..106: note = Description of Artificial Sequence: Synthetic polypeptide
  REGION 1..106: note = Synthetic Construct
DIQMTQSPSSLSASVGDRVTITCSASSSVSYMYWYQQKPGKAPKLLIYLTSILASGVPSRFSGSGSGTDFTFTISSLQPEDIATYYCQQWSFNPYTFGQGTKVEIK

SEQ ID NO: 1090 - protein, 106 aa, synthetic construct
  REGION 1..106: note = Description of Artificial Sequence: Synthetic polypeptide
  REGION 1..106: note = Synthetic Construct
EIVLTQSPGTLSLSPGERATLSCSASSSVSYMYWYQQKPGQAPRLLIYLTSILASGIPDRFSGSGSGTDFTLTISRLEPEDFAVYYCQQWSFNPYTFGQGTKVEIK

SEQ ID NO: 1091 - protein, 106 aa, synthetic construct
  REGION 1..106: note = Description of Artificial Sequence: Synthetic polypeptide
  REGION 1..106: note = Synthetic Construct
DIVMTQSPLSLPVTPGEPASISCSASSSVSYMYWYLQKPGQSPQLLIYLTSILASGVPDRFSGSGSGTDFTLKISRVEAEDVGVYYCQQWSFNPYTFGQGTKVEIK

SEQ ID NO: 1092 - protein, 106 aa, synthetic construct
  REGION 1..106: note = Description of Artificial Sequence: Synthetic polypeptide
  REGION 1..106: note = Synthetic Construct
DVVMTQSPLSLPVTLGQPASISCSASSSVSYMYWFQQRPGQSPRRLIYLTSILASGVPDRFSGSGSGTDFTLKISRVEAEDVGVYYCQQWSFNPYTFGQGTKVEIK

SEQ ID NO: 1093 - protein, 106 aa, synthetic construct
  REGION 1..106: note = Description of Artificial Sequence: Synthetic polypeptide
  REGION 1..106: note = Synthetic Construct
DIVMTQSPDSLAVSLGERATINCSASSSVSYMYWYQQKPGQPPKLLIYLTSILASGVPDRFSGSGSGTDFTLTISSLQAEDVAVYYCQQWSFNPYTFGQGTKVEIK

SEQ ID NO: 1094 - protein, 112 aa, synthetic construct
  REGION 1..112: note = Description of Artificial Sequence: Synthetic polypeptide
  REGION 1..112: note = Synthetic Construct
  VARIANT 3: note = Glutamic acid or Glutamine
DVXMTQTPLSLPVSLGDQASISCRSSQSLVHSNGNTYLHWYLQKPGQSPKLLIYKVSNRFSGVPDRFSGSGSGTDFTLKISRVEAEDLGVYFCSQSTHVPLTFGAGTKLELK

SEQ ID NO: 1095 - protein, 112 aa, synthetic construct
  REGION 1..112: note = Description of Artificial Sequence: Synthetic polypeptide
  REGION 1..112: note = Synthetic Construct
DVVMTQSPLSLPVTLGQPASISCRSSQSLVHSNGNTYLHWFQQRPGQSPRRLIYKVSNRFSGVPDRFSGSGSGTDFTLKISRVEAEDVGVYYCSQSTHVPLTFGQGTKVEIK

SEQ ID NO: 1096 - protein, 112 aa, synthetic construct
  REGION 1..112: note = Description of Artificial Sequence: Synthetic polypeptide
  REGION 1..112: note = Synthetic Construct
DIVMTQSPLSLPVTPGEPASISCRSSQSLVHSNGNTYLHWYLQKPGQSPQLLIYKVSNRFSGVPDRFSGSGSGTDFTLKISRVEAEDVGVYYCSQSTHVPLTFGQGTKVEIK

SEQ ID NO: 1097 - protein, 112 aa, synthetic construct
  REGION 1..112: note = Description of Artificial Sequence: Synthetic polypeptide
  REGION 1..112: note = Synthetic Construct
DIVMTQSPDSLAVSLGERATINCRSSQSLVHSNGNTYLHWYQQKPGQPPKLLIYKVSNRFSGVPDRFSGSGSGTDFTLTISSLQAEDVAVYYCSQSTHVPLTFGQGTKVEIK

SEQ ID NO: 1098 - protein, 112 aa, synthetic construct
  REGION 1..112: note = Description of Artificial Sequence: Synthetic polypeptide
  REGION 1..112: note = Synthetic Construct
EIVLTQSPATLSLSPGERATLSCRSSQSLVHSNGNTYLHWYQQKPGQAPRLLIYKVSNRFSGIPARFSGSGSGTDFTLTISSLEPEDFAVYYCSQSTHVPLTFGQGTKVEIK

SEQ ID NO: 1099 - protein, 112 aa, synthetic construct
  REGION 1..112: note = Description of Artificial Sequence: Synthetic polypeptide
  REGION 1..112: note = Synthetic Construct
DIQMTQSPSSLSASVGDRVTITCRSSQSLVHSNGNTYLHWYQQKPGKAPKLLIYKVSNRFSGVPSRFSGSGSGTDFTLTISSLQPEDFATYYCSQSTHVPLTFGQGTKVEIK

SEQ ID NO: 1100 - protein, 112 aa, synthetic construct
  REGION 1..112: note = Description of Artificial Sequence: Synthetic polypeptide
  REGION 1..112: note = Synthetic Construct
DIQMTQSPSSLSASVGDRVTITCRSSQSLVHSNGNTYLHWYQQKPGKAPKLLIYKVSNRFSGVPSRFSGSGSGTDFTFTISSLQPEDIATYYCSQSTHVPLTFGQGTKVEIK

SEQ ID NO: 1101 - protein, 112 aa, synthetic construct
  REGION 1..112: note = Description of Artificial Sequence: Synthetic polypeptide
  REGION 1..112: note = Synthetic Construct
EIVMTQSPATLSVSPGERATLSCRSSQSLVHSNGNTYLHWYQQKPGQAPRLLIYKVSNRFSGIPARFSGSGSGTEFTLTISSLQSEDFAVYYCSQSTHVPLTFGQGTKVEIK

SEQ ID NO: 1102 - protein, 112 aa, synthetic construct
  REGION 1..112: note = Description of Artificial Sequence: Synthetic polypeptide
  REGION 1..112: note = Synthetic Construct
DIQMTQSPSTLSASVGDRVTITCRSSQSLVHSNGNTYLHWYQQKPGKAPKLLIYKVSNRFSGVPSRFSGSGSGTEFTLTISSLQPDDFATYYCSQSTHVPLTFGQGTKVEIK

SEQ ID NO: 1103 - protein, 112 aa, synthetic construct
  REGION 1..112: note = Description of Artificial Sequence: Synthetic polypeptide
  REGION 1..112: note = Synthetic Construct
DIQLTQSPSFLSASVGDRVTITCRSSQSLVHSNGNTYLHWYQQKPGKAPKLLIYKVSNRFSGVPSRFSGSGSGTEFTLTISSLQPEDFATYYCSQSTHVPLTFGQGTKVEIK

SEQ ID NO: 1104 - protein, 112 aa, synthetic construct
  REGION 1..112: note = Description of Artificial Sequence: Synthetic polypeptide
  REGION 1..112: note = Synthetic Construct
EIVLTQSPGTLSLSPGERATLSCRSSQSLVHSNGNTYLHWYQQKPGQAPRLLIYKVSNRFSGIPDRFSGSGSGTDFTLTISRLEPEDFAVYYCSQSTHVPLTFGQGTKVEIK

SEQ ID NO: 1105 - protein, 104 aa, synthetic construct
  REGION 1..104: note = Description of Artificial Sequence: Synthetic polypeptide
  REGION 1..104: note = Synthetic Construct
  VARIANT 10: note = Glutamic acid or Glutamine
VLTQSPAIMXASPGEKVTMTCSASSSVSYMYWYQQKPRSSPKPWIYLTSILASGVPARFSGSGSGTSYSLTISSMEAEDAATYYCQQWSFNPYTFGGGTKLVIK

SEQ ID NO: 1106 - protein, 105 aa, synthetic construct
  REGION 1..105: note = Description of Artificial Sequence: Synthetic polypeptide
  REGION 1..105: note = Synthetic Construct
NVLTQSPALMSASPGEKVTMTCSASSSVSYMYWYQQKPRSSPKPWIYLTSILASGVPARFSGSGSGTSYSLTISSMEAEDAATYYCQQWSFNPYTFGGGTKLVIK

SEQ ID NO: 1107 - protein, 112 aa, synthetic construct
  REGION 1..112: note = Description of Artificial Sequence: Synthetic polypeptide
  REGION 1..112: note = Synthetic Construct
DVVMTQTPLSLPVSLGDQASISCRSSQTIIHSNGNTYLEWYLRKPGQSPKLLIYKVSNRFSGVPDRFSGSGSGTDFTLKISRVEAEDLGVYYCFQGSHVPYTFGGGTELEIK

SEQ ID NO: 1108 - protein, 112 aa, synthetic construct
  REGION 1..112: note = Description of Artificial Sequence: Synthetic polypeptide
  REGION 1..112: note = Synthetic Construct
DVVMTQSPLSLPVTLGQPASISCRSSQTIIHSNGNTYLEWFQQRPGQSPRRLIYKVSNRFSGVPDRFSGSGSGTDFTLKISRVEAEDVGVYYCFQGSHVPYTFGQGTKVEIK

SEQ ID NO: 1109 - protein, 112 aa, synthetic construct
  REGION 1..112: note = Description of Artificial Sequence: Synthetic polypeptide
  REGION 1..112: note = Synthetic Construct
DIVMTQSPLSLPVTPGEPASISCRSSQTIIHSNGNTYLEWYLQKPGQSPQLLIYKVSNRFSGVPDRFSGSGSGTDFTLKISRVEAEDVGVYYCFQGSHVPYTFGQGTKVEIK

SEQ ID NO: 1110 - protein, 112 aa, synthetic construct
  REGION 1..112: note = Description of Artificial Sequence: Synthetic polypeptide
  REGION 1..112: note = Synthetic Construct
DIVMTQSPDSLAVSLGERATINCRSSQTIIHSNGNTYLEWYQQKPGQPPKLLIYKVSNRFSGVPDRFSGSGSGTDFTLTISSLQAEDVAVYYCFQGSHVPYTFGQGTKVEIK

SEQ ID NO: 1111 - protein, 112 aa, synthetic construct
  REGION 1..112: note = Description of Artificial Sequence: Synthetic polypeptide
  REGION 1..112: note = Synthetic Construct
EIVLTQSPATLSLSPGERATLSCRSSQTIIHSNGNTYLEWYQQKPGQAPRLLIYKVSNRFSGIPARFSGSGSGTDFTLTISSLEPEDFAVYYCFQGSHVPYTFGQGTKVEIK

SEQ ID NO: 1112 - protein, 112 aa, synthetic construct
  REGION 1..112: note = Description of Artificial Sequence: Synthetic polypeptide
  REGION 1..112: note = Synthetic Construct
DIQLTQSPSFLSASVGDRVTITCRSSQTIIHSNGNTYLEWYQQKPGKAPKLLIYKVSNRFSGVPSRFSGSGSGTEFTLTISSLQPEDFATYYCFQGSHVPYTFGQGTKVEIK

SEQ ID NO: 1113 - protein, 112 aa, synthetic construct
  REGION 1..112: note = Description of Artificial Sequence: Synthetic polypeptide
  REGION 1..112: note = Synthetic Construct
DIQMTQSPSSLSASVGDRVTITCRSSQTIIHSNGNTYLEWYQQKPGKAPKLLIYKVSNRFSGVPSRFSGSGSGTDFTFTISSLQPEDIATYYCFQGSHVPYTFGQGTKVEIK

SEQ ID NO: 1114 - protein, 112 aa, synthetic construct
  REGION 1..112: note = Description of Artificial Sequence: Synthetic polypeptide
  REGION 1..112: note = Synthetic Construct
DIQMTQSPSSLSASVGDRVTITCRSSQTIIHSNGNTYLEWYQQKPGKAPKLLIYKVSNRFSGVPSRFSGSGSGTDFTLTISSLQPEDFATYYCFQGSHVPYTFGQGTKVEIK

SEQ ID NO: 1115 - protein, 112 aa, synthetic construct
  REGION 1..112: note = Description of Artificial Sequence: Synthetic polypeptide
  REGION 1..112: note = Synthetic Construct
EIVMTQSPATLSVSPGERATLSCRSSQTIIHSNGNTYLEWYQQKPGQAPRLLIYKVSNRFSGIPARFSGSGSGTEFTLTISSLQSEDFAVYYCFQGSHVPYTFGQGTKVEIK

SEQ ID NO: 1116 - protein, 112 aa, synthetic construct
  REGION 1..112: note = Description of Artificial Sequence: Synthetic polypeptide
  REGION 1..112: note = Synthetic Construct
DIQMTQSPSTLSASVGDRVTITCRSSQTIIHSNGNTYLEWYQQKPGKAPKLLIYKVSNRFSGVPSRFSGSGSGTEFTLTISSLQPDDFATYYCFQGSHVPYTFGQGTKVEIK

SEQ ID NO: 1117 - protein, 112 aa, synthetic construct
  REGION 1..112: note = Description of Artificial Sequence: Synthetic polypeptide
  REGION 1..112: note = Synthetic Construct
EIVLTQSPGTLSLSPGERATLSCRSSQTIIHSNGNTYLEWYQQKPGQAPRLLIYKVSNRFSGIPDRFSGSGSGTDFTLTISRLEPEDFAVYYCFQGSHVPYTFGQGTKVEIK

SEQ ID NO: 1118 - protein, 112 aa, synthetic construct
  REGION 1..112: note = Description of Artificial Sequence: Synthetic polypeptide
  REGION 1..112: note = Synthetic Construct
  VARIANT 78: note = Glutamic acid or Glutamine
DVVMTQTPLTLSVTIGQPASISCKSSQSLLYSNGKTFLSWLLQRPGQSPKRLIYLVSKLDSGVPDRFAGSGSGTDFTXKISRLEADDLGIYYCMQGTHFPLTFGGGTKLEMK

SEQ ID NO: 1119 - protein, 112 aa, synthetic construct
  REGION 1..112: note = Description of Artificial Sequence: Synthetic polypeptide
  REGION 1..112: note = Synthetic Construct
ITMSQSPSSLAVSVGEKVTMSCKSSQSLLYSSDQKNYLAWYQQKPGQSPKLLIYWASTRESGVPDRFTGSGSGTDFTLTISSVKAEDLAVYCCQQYYSYPLTFGAGTKLELK

SEQ ID NO: 1120 - protein, 113 aa, synthetic construct
  REGION 1..113: note = Description of Artificial Sequence: Synthetic polypeptide
  REGION 1..113: note = Synthetic Construct
DIVMTQSPDSLAVSLGERATINCKSSQSLLYSSDQKNYLAWYQQKPGQPPKLLIYWASTRESGVPDRFSGSGSGTDFTLTISSLQAEDVAVYYCQQYYSYPLTFGQGTKVEIK

SEQ ID NO: 1121 - protein, 113 aa, synthetic construct
  REGION 1..113: note = Description of Artificial Sequence: Synthetic polypeptide
  REGION 1..113: note = Synthetic Construct
DIVMTQSPLSLPVTPGEPASISCKSSQSLLYSSDQKNYLAWYLQKPGQSPQLLIYWASTRESGVPDRFSGSGSGTDFTLKISRVEAEDVGVYYCQQYYSYPLTFGQGTKVEIK

SEQ ID NO: 1122 - protein, 113 aa, synthetic construct
  REGION 1..113: note = Description of Artificial Sequence: Synthetic polypeptide
  REGION 1..113: note = Synthetic Construct
DVVMTQSPLSLPVTLGQPASISCKSSQSLLYSSDQKNYLAWFQQRPGQSPRRLIYWASTRESGVPDRFSGSGSGTDFTLKISRVEAEDVGVYYCQQYYSYPLTFGQGTKVEIK

SEQ ID NO: 1123 - protein, 113 aa, synthetic construct
  REGION 1..113: note = Description of Artificial Sequence: Synthetic polypeptide
  REGION 1..113: note = Synthetic Construct
DIQMTQSPSTLSASVGDRVTITCKSSQSLLYSSDQKNYLAWYQQKPGKAPKLLIYWASTRESGVPSRFSGSGSGTEFTLTISSLQPDDFATYYCQQYYSYPLTFGQGTKVEIK

SEQ ID NO: 1124 - protein, 113 aa, synthetic construct
  REGION 1..113: note = Description of Artificial Sequence: Synthetic polypeptide
  REGION 1..113: note = Synthetic Construct
DIQLTQSPSFLSASVGDRVTITCKSSQSLLYSSDQKNYLAWYQQKPGKAPKLLIYWASTRESGVPSRFSGSGSGTEFTLTISSLQPEDFATYYCQQYYSYPLTFGQGTKVEIK

SEQ ID NO: 1125 - protein, 113 aa, synthetic construct
  REGION 1..113: note = Description of Artificial Sequence: Synthetic polypeptide
  REGION 1..113: note = Synthetic Construct
EIVMTQSPATLSVSPGERATLSCKSSQSLLYSSDQKNYLAWYQQKPGQAPRLLIYWASTRESGIPARFSGSGSGTEFTLTISSLQSEDFAVYYCQQYYSYPLTFGQGTKVEIK

SEQ ID NO: 1126 - protein, 113 aa, synthetic construct
  REGION 1..113: note = Description of Artificial Sequence: Synthetic polypeptide
  REGION 1..113: note = Synthetic Construct
DIQMTQSPSSLSASVGDRVTITCKSSQSLLYSSDQKNYLAWYQQKPGKAPKLLIYWASTRESGVPSRFSGSGSGTDFTLTISSLQPEDFATYYCQQYYSYPLTFGQGTKVEIK

SEQ ID NO: 1127 - protein, 113 aa, synthetic construct
  REGION 1..113: note = Description of Artificial Sequence: Synthetic polypeptide
  REGION 1..113: note = Synthetic Construct
EIVLTQSPATLSLSPGERATLSCKSSQSLLYSSDQKNYLAWYQQKPGQAPRLLIYWASTRESGIPARFSGSGSGTDFTLTISSLEPEDFAVYYCQQYYSYPLTFGQGTKVEIK

SEQ ID NO: 1128 - protein, 113 aa, synthetic construct
  REGION 1..113: note = Description of Artificial Sequence: Synthetic polypeptide
  REGION 1..113: note = Synthetic Construct
DIQMTQSPSSLSASVGDRVTITCKSSQSLLYSSDQKNYLAWYQQKPGKAPKLLIYWASTRESGVPSRFSGSGSGTDFTFTISSLQPEDIATYYCQQYYSYPLTFGQGTKVEIK

SEQ ID NO: 1129 - protein, 113 aa, synthetic construct
  REGION 1..113: note = Description of Artificial Sequence: Synthetic polypeptide
  REGION 1..113: note = Synthetic Construct
EIVLTQSPGTLSLSPGERATLSCKSSQSLLYSSDQKNYLAWYQQKPGQAPRLLIYWASTRESGIPDRFSGSGSGTDFTLTISRLEPEDFAVYYCQQYYSYPLTFGQGTKVEIK

SEQ ID NO: 1130 - protein, 112 aa, synthetic construct
  REGION 1..112: note = Description of Artificial Sequence: Synthetic polypeptide
  REGION 1..112: note = Synthetic Construct
  VARIANT 3: note = Glutamic acid or Glutamine
DVXMTQTPLSLPVSLGDQASISCRSSQTIIHSNGNTYLEWYLRKPGQSPKLLIYKVSNRFSGVPDRFSGSGSGTDFTLKISRVEGEDLGVYYCFQGSHVPYTFGGGTELEIK

SEQ ID NO: 1131 - protein, 105 aa, synthetic construct
  REGION 1..105: note = Description of Artificial Sequence: Synthetic polypeptide
  REGION 1..105: note = Synthetic Construct
  VARIANT 10: note = Glutamic acid or Glutamine
  VARIANT 12: note = Glutamic acid or Glutamine
  VARIANT 76: note = Any naturally occurring amino acid
QMSQSPACLXAXVGESVTITCRASENIYSYLAWYQQKQGKSPKLVVYKAKTLAEGVPSRFSGRGSGTQFFLKINSXQREDFGSYYCQHHYGTPFTFGSGTKLEIK

SEQ ID NO: 1132 - protein, 107 aa, synthetic construct
  REGION 1..107: note = Description of Artificial Sequence: Synthetic polypeptide
  REGION 1..107: note = Synthetic Construct
DIQLTQSPSFLSASVGDRVTITCRASENIYSYLAWYQQKPGKAPKLLIYKAKTLAEGVPSRFSGSGSGTEFTLTISSLQPEDFATYYCQHHYGTPFTFGQGTKVEIK

SEQ ID NO: 1133 - protein, 107 aa, synthetic construct
  REGION 1..107: note = Description of Artificial Sequence: Synthetic polypeptide
  REGION 1..107: note = Synthetic Construct
EIVLTQSPATLSLSPGERATLSCRASENIYSYLAWYQQKPGQAPRLLIYKAKTLAEGIPARFSGSGSGTDFTLTISSLEPEDFAVYYCQHHYGTPFTFGQGTKVEIK

SEQ ID NO: 1134 - protein, 107 aa, synthetic construct
  REGION 1..107: note = Description of Artificial Sequence: Synthetic polypeptide
  REGION 1..107: note = Synthetic Construct
DIQMTQSPSTLSASVGDRVTITCRASENIYSYLAWYQQKPGKAPKLLIYKAKTLAEGVPSRFSGSGSGTEFTLTISSLQPDDFATYYCQHHYGTPFTFGQGTKVEIK

SEQ ID NO: 1135 - protein, 107 aa, synthetic construct
  REGION 1..107: note = Description of Artificial Sequence: Synthetic polypeptide
  REGION 1..107: note = Synthetic Construct
EIVMTQSPATLSVSPGERATLSCRASENIYSYLAWYQQKPGQAPRLLIYKAKTLAEGIPARFSGSGSGTEFTLTISSLQSEDFAVYYCQHHYGTPFTFGQGTKVEIK

SEQ ID NO: 1136 - protein, 107 aa, synthetic construct
  REGION 1..107: note = Description of Artificial Sequence: Synthetic polypeptide
  REGION 1..107: note = Synthetic Construct
DIQMTQSPSSLSASVGDRVTITCRASENIYSYLAWYQQKPGKAPKLLIYKAKTLAEGVPSRFSGSGSGTDFTLTISSLQPEDFATYYCQHHYGTPFTFGQGTKVEIK

SEQ ID NO: 1137 - protein, 107 aa, synthetic construct
  REGION 1..107: note = Description of Artificial Sequence: Synthetic polypeptide
  REGION 1..107: note = Synthetic Construct
DIQMTQSPSSLSASVGDRVTITCRASENIYSYLAWYQQKPGKAPKLLIYKAKTLAEGVPSRFSGSGSGTDFTFTISSLQPEDIATYYCQHHYGTPFTFGQGTKVEIK

SEQ ID NO: 1138 - protein, 107 aa, synthetic construct
  REGION 1..107: note = Description of Artificial Sequence: Synthetic polypeptide
  REGION 1..107: note = Synthetic Construct
EIVLTQSPGTLSLSPGERATLSCRASENIYSYLAWYQQKPGQAPRLLIYKAKTLAEGIPDRFSGSGSGTDFTLTISRLEPEDFAVYYCQHHYGTPFTFGQGTKVEIK

SEQ ID NO: 1139 - protein, 107 aa, synthetic construct
  REGION 1..107: note = Description of Artificial Sequence: Synthetic polypeptide
  REGION 1..107: note = Synthetic Construct
DIVMTQSPLSLPVTPGEPASISCRASENIYSYLAWYLQKPGQSPQLLIYKAKTLAEGVPDRFSGSGSGTDFTLKISRVEAEDVGVYYCQHHYGTPFTFGQGTKVEIK

SEQ ID NO: 1140 - protein, 107 aa, synthetic construct
  REGION 1..107: note = Description of Artificial Sequence: Synthetic polypeptide
  REGION 1..107: note = Synthetic Construct
DIVMTQSPDSLAVSLGERATINCRASENIYSYLAWYQQKPGQPPKLLIYKAKTLAEGVPDRFSGSGSGTDFTLTISSLQAEDVAVYYCQHHYGTPFTFGQGTKVEIK

SEQ ID NO: 1141 - protein, 107 aa, synthetic construct
  REGION 1..107: note = Description of Artificial Sequence: Synthetic polypeptide
  REGION 1..107: note = Synthetic Construct
DVVMTQSPLSLPVTLGQPASISCRASENIYSYLAWFQQRPGQSPRRLIYKAKTLAEGVPDRFSGSGSGTDFTLKISRVEAEDVGVYYCQHHYGTPFTFGQGTKVEIK

SEQ ID NO: 1142 - protein, 107 aa, synthetic construct
  REGION 1..107: note = Description of Artificial Sequence: Synthetic polypeptide
  REGION 1..107: note = Synthetic Construct
DIQMTQSPASLSVSVGETVTITCRTSENVYSNLAWYQQKQGKSPQLLVYAATNLADGVPSRFSASGSATQFSLKINSLQSADFGSYYCHHFWGTPYTFGGGTKLEMN

SEQ ID NO: 1143 - protein, 107 aa, synthetic construct
  REGION 1..107: note = Description of Artificial Sequence: Synthetic polypeptide
  REGION 1..107: note = Synthetic Construct
EIVMTQSPATLSVSPGERATLSCRTSENVYSNLAWYQQKPGQAPRLLIYAATNLADGIPARFSGSGSGTEFTLTISSLQSEDFAVYYCHHFWGTPYTFGQGTKVEIK

SEQ ID NO: 1144 - protein, 107 aa, synthetic construct
  REGION 1..107: note = Description of Artificial Sequence: Synthetic polypeptide
  REGION 1..107: note = Synthetic Construct
EIVLTQSPATLSLSPGERATLSCRTSENVYSNLAWYQQKPGQAPRLLIYAATNLADGIPARFSGSGSGTDFTLTISSLEPEDFAVYYCHHFWGTPYTFGQGTKVEIK

SEQ ID NO: 1145 - protein, 107 aa, synthetic construct
  REGION 1..107: note = Description of Artificial Sequence: Synthetic polypeptide
  REGION 1..107: note = Synthetic Construct
DIQLTQSPSFLSASVGDRVTITCRTSENVYSNLAWYQQKPGKAPKLLIYAATNLADGVPSRFSGSGSGTEFTLTISSLQPEDFATYYCHHFWGTPYTFGQGTKVEIK

SEQ ID NO: 1146 - protein, 107 aa, synthetic construct
  REGION 1..107: note = Description of Artificial Sequence: Synthetic polypeptide
  REGION 1..107: note = Synthetic Construct
DIQMTQSPSTLSASVGDRVTITCRTSENVYSNLAWYQQKPGKAPKLLIYAATNLADGVPSRFSGSGSGTEFTLTISSLQPDDFATYYCHHFWGTPYTFGQGTKVEIK

SEQ ID NO: 1147 - protein, 107 aa, synthetic construct
  REGION 1..107: note = Description of Artificial Sequence: Synthetic polypeptide
  REGION 1..107: note = Synthetic Construct
DIQMTQSPSSLSASVGDRVTITCRTSENVYSNLAWYQQKPGKAPKLLIYAATNLADGVPSRFSGSGSGTDFTLTISSLQPEDFATYYCHHFWGTPYTFGQGTKVEIK

SEQ ID NO: 1148 - protein, 107 aa, synthetic construct
  REGION 1..107: note = Description of Artificial Sequence: Synthetic polypeptide
  REGION 1..107: note = Synthetic Construct
DIQMTQSPSSLSASVGDRVTITCRTSENVYSNLAWYQQKPGKAPKLLIYAATNLADGVPSRFSGSGSGTDFTFTISSLQPEDIATYYCHHFWGTPYTFGQGTKVEIK

SEQ ID NO: 1149 - protein, 107 aa, synthetic construct
  REGION 1..107: note = Description of Artificial Sequence: Synthetic polypeptide
  REGION 1..107: note = Synthetic Construct
EIVLTQSPGTLSLSPGERATLSCRTSENVYSNLAWYQQKPGQAPRLLIYAATNLADGIPDRFSGSGSGTDFTLTISRLEPEDFAVYYCHHFWGTPYTFGQGTKVEIK

SEQ ID NO: 1150 - protein, 107 aa, synthetic construct
  REGION 1..107: note = Description of Artificial Sequence: Synthetic polypeptide
  REGION 1..107: note = Synthetic Construct
DIVMTQSPLSLPVTPGEPASISCRTSENVYSNLAWYLQKPGQSPQLLIYAATNLADGVPDRFSGSGSGTDFTLKISRVEAEDVGVYYCHHFWGTPYTFGQGTKVEIK

SEQ ID NO: 1151 - protein, 107 aa, synthetic construct
  REGION 1..107: note = Description of Artificial Sequence: Synthetic polypeptide
  REGION 1..107: note = Synthetic Construct
DVVMTQSPLSLPVTLGQPASISCRTSENVYSNLAWFQQRPGQSPRRLIYAATNLADGVPDRFSGSGSGTDFTLKISRVEAEDVGVYYCHHFWGTPYTFGQGTKVEIK

SEQ ID NO: 1152 - protein, 107 aa, synthetic construct
  REGION 1..107: note = Description of Artificial Sequence: Synthetic polypeptide
  REGION 1..107: note = Synthetic Construct
DIVMTQSPDSLAVSLGERATINCRTSENVYSNLAWYQQKPGQPPKLLIYAATNLADGVPDRFSGSGSGTDFTLTISSLQAEDVAVYYCHHFWGTPYTFGQGTKVEIK

SEQ ID NO: 1153 - protein, 112 aa, synthetic construct
  REGION 1..112: note = Description of Artificial Sequence: Synthetic polypeptide
  REGION 1..112: note = Synthetic Construct
  VARIANT 3: note = Glutamic acid or Glutamine
DVXMTQNPLSLPVSLGDQASISCRSSQSLVHSNGYTYLHWYLQKPGQSPKLLIYKVSNRFSGVPDRFSGSGSGTDFTLKISRVEADDLGVYLCSQSTRVPYTFGGGTKLEIK

SEQ ID NO: 1154 - protein, 112 aa, synthetic construct
  REGION 1..112: note = Description of Artificial Sequence: Synthetic polypeptide
  REGION 1..112: note = Synthetic Construct
DVVMTQSPLSLPVTLGQPASISCRSSQSLVHSNGYTYLHWFQQRPGQSPRRLIYKVSNRFSGVPDRFSGSGSGTDFTLKISRVEAEDVGVYYCSQSTRVPYTFGQGTKVEIK

SEQ ID NO: 1155 - protein, 112 aa, synthetic construct
  REGION 1..112: note = Description of Artificial Sequence: Synthetic polypeptide
  REGION 1..112: note = Synthetic Construct
DIVMTQSPLSLPVTPGEPASISCRSSQSLVHSNGYTYLHWYLQKPGQSPQLLIYKVSNRFSGVPDRFSGSGSGTDFTLKISRVEAEDVGVYYCSQSTRVPYTFGQGTKVEIK

SEQ ID NO: 1156 - protein, 112 aa, synthetic construct
  REGION 1..112: note = Description of Artificial Sequence: Synthetic polypeptide
  REGION 1..112: note = Synthetic Construct
DIVMTQSPDSLAVSLGERATINCRSSQSLVHSNGYTYLHWYQQKPGQPPKLLIYKVSNRFSGVPDRFSGSGSGTDFTLTISSLQAEDVAVYYCSQSTRVPYTFGQGTKVEIK

SEQ ID NO: 1157 - protein, 112 aa, synthetic construct
  REGION 1..112: note = Description of Artificial Sequence: Synthetic polypeptide
  REGION 1..112: note = Synthetic Construct
EIVLTQSPATLSLSPGERATLSCRSSQSLVHSNGYTYLHWYQQKPGQAPRLLIYKVSNRFSGIPARFSGSGSGTDFTLTISSLEPEDFAVYYCSQSTRVPYTFGQGTKVEIK

SEQ ID NO: 1158 - protein, 112 aa, synthetic construct
  REGION 1..112: note = Description of Artificial Sequence: Synthetic polypeptide
  REGION 1..112: note = Synthetic Construct
DIQMTQSPSSLSASVGDRVTITCRSSQSLVHSNGYTYLHWYQQKPGKAPKLLIYKVSNRFSGVPSRFSGSGSGTDFTFTISSLQPEDIATYYCSQSTRVPYTFGQGTKVEIK

SEQ ID NO: 1159 - protein, 112 aa, synthetic construct
  REGION 1..112: note = Description of Artificial Sequence: Synthetic polypeptide
  REGION 1..112: note = Synthetic Construct
EIVMTQSPATLSVSPGERATLSCRSSQSLVHSNGYTYLHWYQQKPGQAPRLLIYKVSNRFSGIPARFSGSGSGTEFTLTISSLQSEDFAVYYCSQSTRVPYTFGQGTKVEIK

SEQ ID NO: 1160 - protein, 112 aa, synthetic construct
  REGION 1..112: note = Description of Artificial Sequence: Synthetic polypeptide
  REGION 1..112: note = Synthetic Construct
DIQMTQSPSTLSASVGDRVTITCRSSQSLVHSNGYTYLHWYQQKPGKAPKLLIYKVSNRFSGVPSRFSGSGSGTEFTLTISSLQPDDFATYYCSQSTRVPYTFGQGTKVEIK

SEQ ID NO: 1161 - protein, 112 aa, synthetic construct
  REGION 1..112: note = Description of Artificial Sequence: Synthetic polypeptide
  REGION 1..112: note = Synthetic Construct
DIQMTQSPSSLSASVGDRVTITCRSSQSLVHSNGYTYLHWYQQKPGKAPKLLIYKVSNRFSGVPSRFSGSGSGTDFTLTISSLQPEDFATYYCSQSTRVPYTFGQGTKVEIK

SEQ ID NO: 1162 - protein, 112 aa, synthetic construct
  REGION 1..112: note = Description of Artificial Sequence: Synthetic polypeptide
  REGION 1..112: note = Synthetic Construct
DIQLTQSPSFLSASVGDRVTITCRSSQSLVHSNGYTYLHWYQQKPGKAPKLLIYKVSNRFSGVPSRFSGSGSGTEFTLTISSLQPEDFATYYCSQSTRVPYTFGQGTKVEIK

SEQ ID NO: 1163 - protein, 112 aa, synthetic construct
  REGION 1..112: note = Description of Artificial Sequence: Synthetic polypeptide
  REGION 1..112: note = Synthetic Construct
EIVLTQSPGTLSLSPGERATLSCRSSQSLVHSNGYTYLHWYQQKPGQAPRLLIYKVSNRFSGIPDRFSGSGSGTDFTLTISRLEPEDFAVYYCSQSTRVPYTFGQGTKVEIK

SEQ ID NO: 1164 - protein, 112 aa, synthetic construct
  REGION 1..112: note = Description of Artificial Sequence: Synthetic polypeptide
  REGION 1..112: note = Synthetic Construct
DVLMTQTPLSLPVSLGDQASISCRFSQSLVHSNGNTYLHWYLQKPGQSPKLLIYKVSNRFSGVPDRFSGSGSGTDFTLRISGVEAEDLGVYFCSQSTRVPPTFGGGTKLEIK

SEQ ID NO: 1165 - protein, 112 aa, synthetic construct
  REGION 1..112: note = Description of Artificial Sequence: Synthetic polypeptide
  REGION 1..112: note = Synthetic Construct
DVVMTQSPLSLPVTLGQPASISCRFSQSLVHSNGNTYLHWFQQRPGQSPRRLIYKVSNRFSGVPDRFSGSGSGTDFTLKISRVEAEDVGVYYCSQSTRVPPTFGQGTKVEIK

SEQ ID NO: 1166 - protein, 112 aa, synthetic construct
  REGION 1..112: note = Description of Artificial Sequence: Synthetic polypeptide
  REGION 1..112: note = Synthetic Construct
DIVMTQSPLSLPVTPGEPASISCRFSQSLVHSNGNTYLHWYLQKPGQSPQLLIYKVSNRFSGVPDRFSGSGSGTDFTLKISRVEAEDVGVYYCSQSTRVPPTFGQGTKVEIK

SEQ ID NO: 1167 - protein, 112 aa, synthetic construct
  REGION 1..112: note = Description of Artificial Sequence: Synthetic polypeptide
  REGION 1..112: note = Synthetic Construct
DIVMTQSPDSLAVSLGERATINCRFSQSLVHSNGNTYLHWYQQKPGQPPKLLIYKVSNRFSGVPDRFSGSGSGTDFTLTISSLQAEDVAVYYCSQSTRVPPTFGQGTKVEIK

SEQ ID NO: 1168 - protein, 112 aa, synthetic construct
  REGION 1..112: note = Description of Artificial Sequence: Synthetic polypeptide
  REGION 1..112: note = Synthetic Construct
EIVLTQSPATLSLSPGERATLSCRFSQSLVHSNGNTYLHWYQQKPGQAPRLLIYKVSNRFSGIPARFSGSGSGTDFTLTISSLEPEDFAVYYCSQSTRVPPTFGQGTKVEIK

SEQ ID NO: 1169 - protein, 112 aa, synthetic construct
  REGION 1..112: note = Description of Artificial Sequence: Synthetic polypeptide
  REGION 1..112: note = Synthetic Construct
EIVMTQSPATLSVSPGERATLSCRFSQSLVHSNGNTYLHWYQQKPGQAPRLLIYKVSNRFSGIPARFSGSGSGTEFTLTISSLQSEDFAVYYCSQSTRVPPTFGQGTKVEIK

SEQ ID NO: 1170 - protein, 112 aa, synthetic construct
  REGION 1..112: note = Description of Artificial Sequence: Synthetic polypeptide
  REGION 1..112: note = Synthetic Construct
DIQLTQSPSFLSASVGDRVTITCRFSQSLVHSNGNTYLHWYQQKPGKAPKLLIYKVSNRFSGVPSRFSGSGSGTEFTLTISSLQPEDFATYYCSQSTRVPPTFGQGTKVEIK

SEQ ID NO: 1171 - protein, 112 aa, synthetic construct
  REGION 1..112: note = Description of Artificial Sequence: Synthetic polypeptide
  REGION 1..112: note = Synthetic Construct
DIQMTQSPSTLSASVGDRVTITCRFSQSLVHSNGNTYLHWYQQKPGKAPKLLIYKVSNRFSGVPSRFSGSGSGTEFTLTISSLQPDDFATYYCSQSTRVPPTFGQGTKVEIK

SEQ ID NO: 1172 - protein, 112 aa, synthetic construct
  REGION 1..112: note = Description of Artificial Sequence: Synthetic polypeptide
  REGION 1..112: note = Synthetic Construct
DIQMTQSPSSLSASVGDRVTITCRFSQSLVHSNGNTYLHWYQQKPGKAPKLLIYKVSNRFSGVPSRFSGSGSGTDFTLTISSLQPEDFATYYCSQSTRVPPTFGQGTKVEIK

SEQ ID NO: 1173 - protein, 112 aa, synthetic construct
  REGION 1..112: note = Description of Artificial Sequence: Synthetic polypeptide
  REGION 1..112: note = Synthetic Construct
DIQMTQSPSSLSASVGDRVTITCRFSQSLVHSNGNTYLHWYQQKPGKAPKLLIYKVSNRFSGVPSRFSGSGSGTDFTFTISSLQPEDIATYYCSQSTRVPPTFGQGTKVEIK

SEQ ID NO: 1174 - protein, 112 aa, synthetic construct
  REGION 1..112: note = Description of Artificial Sequence: Synthetic polypeptide
  REGION 1..112: note = Synthetic Construct
EIVLTQSPGTLSLSPGERATLSCRFSQSLVHSNGNTYLHWYQQKPGQAPRLLIYKVSNRFSGIPDRFSGSGSGTDFTLTISRLEPEDFAVYYCSQSTRVPPTFGQGTKVEIK

SEQ ID NO: 1175 - protein, 117 aa, synthetic construct
  REGION 1..117: note = Description of Artificial Sequence: Synthetic polypeptide
  REGION 1..117: note = Synthetic Construct
EVQLVESGGGLVQPKGSLKLSCAAFGFNFNTYAMKWVRQTPGKGLEWIARIRSNSNDYATNYSDSVKDRFTISRDDSESIVYVQMNNLKTEDTGMYSCVGHKINNYPFAHWGRGTLV

SEQ ID NO: 1176 - protein, 105 aa, synthetic construct
  REGION 1..105: note = Description of Artificial Sequence: Synthetic polypeptide
  REGION 1..105: note = Synthetic Construct
DIQMTQSPSSLSASVGDRVTITCKASSNVNYMSWYQQKPGKAPKLLIYFTSNLPSGVPSRFSGSGSGTDFTFTISSLQPEDIATYYCSGEVTQFTFGQGTKVEIK

SEQ ID NO: 1177 - protein, 105 aa, synthetic construct
  REGION 1..105: note = Description of Artificial Sequence: Synthetic polypeptide
  REGION 1..105: note = Synthetic Construct
DIQLTQSPSFLSASVGDRVTITCKASSNVNYMSWYQQKPGKAPKLLIYFTSNLPSGVPSRFSGSGSGTEFTLTISSLQPEDFATYYCSGEVTQFTFGQGTKVEIK

SEQ ID NO: 1178 - protein, 105 aa, synthetic construct
  REGION 1..105: note = Description of Artificial Sequence: Synthetic polypeptide
  REGION 1..105: note = Synthetic Construct
DIQMTQSPSSLSASVGDRVTITCKASSNVNYMSWYQQKPGKAPKLLIYFTSNLPSGVPSRFSGSGSGTDFTLTISSLQPEDFATYYCSGEVTQFTFGQGTKVEIK

SEQ ID NO: 1179 - protein, 105 aa, synthetic construct
  REGION 1..105: note = Description of Artificial Sequence: Synthetic polypeptide
  REGION 1..105: note = Synthetic Construct
DIQMTQSPSTLSASVGDRVTITCKASSNVNYMSWYQQKPGKAPKLLIYFTSNLPSGVPSRFSGSGSGTEFTLTISSLQPDDFATYYCSGEVTQFTFGQGTKVEIK

SEQ ID NO: 1180 - protein, 105 aa, synthetic construct
  REGION 1..105: note = Description of Artificial Sequence: Synthetic polypeptide
  REGION 1..105: note = Synthetic Construct
EIVMTQSPATLSVSPGERATLSCKASSNVNYMSWYQQKPGQAPRLLIYFTSNLPSGIPARFSGSGSGTEFTLTISSLQSEDFAVYYCSGEVTQFTFGQGTKVEIK

SEQ ID NO: 1181 - protein, 105 aa, synthetic construct
  REGION 1..105: note = Description of Artificial Sequence: Synthetic polypeptide
  REGION 1..105: note = Synthetic Construct
EIVLTQSPGTLSLSPGERATLSCKASSNVNYMSWYQQKPGQAPRLLIYFTSNLPSGIPDRFSGSGSGTDFTLTISRLEPEDFAVYYCSGEVTQFTFGQGTKVEIK

SEQ ID NO: 1182 - protein, 105 aa, synthetic construct
  REGION 1..105: note = Description of Artificial Sequence: Synthetic polypeptide
  REGION 1..105: note = Synthetic Construct
DIVMTQSPLSLPVTPGEPASISCKASSNVNYMSWYLQKPGQSPQLLIYFTSNLPSGVPDRFSGSGSGTDFTLKISRVEAEDVGVYYCSGEVTQFTFGQGTKVEIK

SEQ ID NO: 1183 - protein, 105 aa, synthetic construct
  REGION 1..105: note = Description of Artificial Sequence: Synthetic polypeptide
  REGION 1..105: note = Synthetic Construct
DVVMTQSPLSLPVTLGQPASISCKASSNVNYMSWFQQRPGQSPRRLIYFTSNLPSGVPDRFSGSGSGTDFTLKISRVEAEDVGVYYCSGEVTQFTFGQGTKVEIK

SEQ ID NO: 1184 - protein, 105 aa, synthetic construct
  REGION 1..105: note = Description of Artificial Sequence: Synthetic polypeptide
  REGION 1..105: note = Synthetic Construct
DIVMTQSPDSLAVSLGERATINCKASSNVNYMSWYQQKPGQPPKLLIYFTSNLPSGVPDRFSGSGSGTDFTLTISSLQAEDVAVYYCSGEVTQFTFGQGTKVEIK

SEQ ID NO: 1185 - protein, 112 aa, synthetic construct
  REGION 1..112: note = Description of Artificial Sequence: Synthetic polypeptide
  REGION 1..112: note = Synthetic Construct
DVVMTQTPLSLPVSLGDQASISCRSSQTIIHSNGNTYLEWYLRKPGQSPKLLIYKVSNRFCGVPDRFSGSGSGTDFTLKISRVEAEDLGVYYCFQGSHVPYTFGGGTELEIK

SEQ ID NO: 1186 - protein, 112 aa, synthetic construct
  REGION 1..112: note = Description of Artificial Sequence: Synthetic polypeptide
  REGION 1..112: note = Synthetic Construct
DVVMTQSPLSLPVTLGQPASISCRSSQTIIHSNGNTYLEWFQQRPGQSPRRLIYKVSNRFCGVPDRFSGSGSGTDFTLKISRVEAEDVGVYYCFQGSHVPYTFGQGTKVEIK

SEQ ID NO: 1187 - protein, 112 aa, synthetic construct
  REGION 1..112: note = Description of Artificial Sequence: Synthetic polypeptide
  REGION 1..112: note = Synthetic Construct
DIVMTQSPLSLPVTPGEPASISCRSSQTIIHSNGNTYLEWYLQKPGQSPQLLIYKVSNRFCGVPDRFSGSGSGTDFTLKISRVEAEDVGVYYCFQGSHVPYTFGQGTKVEIK

SEQ ID NO: 1188 - protein, 112 aa, synthetic construct
  REGION 1..112: note = Description of Artificial Sequence: Synthetic polypeptide
  REGION 1..112: note = Synthetic Construct
DIVMTQSPDSLAVSLGERATINCRSSQTIIHSNGNTYLEWYQQKPGQPPKLLIYKVSNRFCGVPDRFSGSGSGTDFTLTISSLQAEDVAVYYCFQGSHVPYTFGQGTKVEIK

SEQ ID NO: 1189 - protein, 112 aa, synthetic construct
  REGION 1..112: note = Description of Artificial Sequence: Synthetic polypeptide
  REGION 1..112: note = Synthetic Construct
EIVLTQSPATLSLSPGERATLSCRSSQTIIHSNGNTYLEWYQQKPGQAPRLLIYKVSNRFCGIPARFSGSGSGTDFTLTISSLEPEDFAVYYCFQGSHVPYTFGQGTKVEIK

SEQ ID NO: 1190 - protein, 112 aa, synthetic construct
  REGION 1..112: note = Description of Artificial Sequence: Synthetic polypeptide
  REGION 1..112: note = Synthetic Construct
EIVMTQSPATLSVSPGERATLSCRSSQTIIHSNGNTYLEWYQQKPGQAPRLLIYKVSNRFCGIPARFSGSGSGTEFTLTISSLQSEDFAVYYCFQGSHVPYTFGQGTKVEIK

SEQ ID NO: 1191 - protein, 112 aa, synthetic construct
  REGION 1..112: note = Description of Artificial Sequence: Synthetic polypeptide
  REGION 1..112: note = Synthetic Construct
DIQMTQSPSSLSASVGDRVTITCRSSQTIIHSNGNTYLEWYQQKPGKAPKLLIYKVSNRFCGVPSRFSGSGSGTDFTFTISSLQPEDIATYYCFQGSHVPYTFGQGTKVEIK

SEQ ID NO: 1192 - protein, 112 aa, synthetic construct
  REGION 1..112: note = Description of Artificial Sequence: Synthetic polypeptide
  REGION 1..112: note = Synthetic Construct
EIVLTQSPGTLSLSPGERATLSCRSSQTIIHSNGNTYLEWYQQKPGQAPRLLIYKVSNRFCGIPDRFSGSGSGTDFTLTISRLEPEDFAVYYCFQGSHVPYTFGQGTKVEIK

SEQ ID NO: 1193 - protein, 112 aa, synthetic construct
  REGION 1..112: note = Description of Artificial Sequence: Synthetic polypeptide
  REGION 1..112: note = Synthetic Construct
DIQLTQSPSFLSASVGDRVTITCRSSQTIIHSNGNTYLEWYQQKPGKAPKLLIYKVSNRFCGVPSRFSGSGSGTEFTLTISSLQPEDFATYYCFQGSHVPYTFGQGTKVEIK

SEQ ID NO: 1194 - protein, 112 aa, synthetic construct
  REGION 1..112: note = Description of Artificial Sequence: Synthetic polypeptide
  REGION 1..112: note = Synthetic Construct
DIQMTQSPSTLSASVGDRVTITCRSSQTIIHSNGNTYLEWYQQKPGKAPKLLIYKVSNRFCGVPSRFSGSGSGTEFTLTISSLQPDDFATYYCFQGSHVPYTFGQGTKVEIK

SEQ ID NO: 1195 - protein, 112 aa, synthetic construct
  REGION 1..112: note = Description of Artificial Sequence: Synthetic polypeptide
  REGION 1..112: note = Synthetic Construct
DIQMTQSPSSLSASVGDRVTITCRSSQTIIHSNGNTYLEWYQQKPGKAPKLLIYKVSNRFCGVPSRFSGSGSGTDFTLTISSLQPEDFATYYCFQGSHVPYTFGQGTKVEIK

SEQ ID NO: 1196 - protein, 113 aa, synthetic construct
  REGION 1..113: note = Description of Artificial Sequence: Synthetic polypeptide
  REGION 1..113: note = Synthetic Construct
  VARIANT 3: note = Glutamic acid or Glutamine
  VARIANT 50: note = Glutamic acid or Glutamine
  VARIANT 73: note = Any naturally occurring amino acid
DIXMTQSPSSLTVTAGEKVTMSCKSSQSLLNSGNQKKYLTWYQQKPGQPXKLLIYWASTRESGVRDRFTGSGXGTDFTLTISSVQGEDLAIYYCQNDYGFPLTFGGGTKLEMK

SEQ ID NO: 1197 - protein, 113 aa, synthetic construct
  REGION 1..113: note = Description of Artificial Sequence: Synthetic polypeptide
  REGION 1..113: note = Synthetic Construct
DIVMTQSPDSLAVSLGERATINCKSSQSLLNSGNQKKYLTWYQQKPGQPPKLLIYWASTRESGVPDRFSGSGSGTDFTLTISSLQAEDVAVYYCQNDYGFPLTFGQGTKVEIK

SEQ ID NO: 1198 - protein, 113 aa, synthetic construct
  REGION 1..113: note = Description of Artificial Sequence: Synthetic polypeptide
  REGION 1..113: note = Synthetic Construct
DVVMTQSPLSLPVTLGQPASISCKSSQSLLNSGNQKKYLTWFQQRPGQSPRRLIYWASTRESGVPDRFSGSGSGTDFTLKISRVEAEDVGVYYCQNDYGFPLTFGQGTKVEIK

SEQ ID NO: 1199 - protein, 113 aa, synthetic construct
  REGION 1..113: note = Description of Artificial Sequence: Synthetic polypeptide
  REGION 1..113: note = Synthetic Construct
DIVMTQSPLSLPVTPGEPASISCKSSQSLLNSGNQKKYLTWYLQKPGQSPQLLIYWASTRESGVPDRFSGSGSGTDFTLKISRVEAEDVGVYYCQNDYGFPLTFGQGTKVEIK

SEQ ID NO: 1200 - protein, 113 aa, synthetic construct
  REGION 1..113: note = Description of Artificial Sequence: Synthetic polypeptide
  REGION 1..113: note = Synthetic Construct
DIQMTQSPSSLSASVGDRVTITCKSSQSLLNSGNQKKYLTWYQQKPGKAPKLLIYWASTRESGVPSRFSGSGSGTDFTFTISSLQPEDIATYYCQNDYGFPLTFGQGTKVEIK

SEQ ID NO: 1201 - protein, 113 aa, synthetic construct
  REGION 1..113: note = Description of Artificial Sequence: Synthetic polypeptide
  REGION 1..113: note = Synthetic Construct
EIVLTQSPATLSLSPGERATLSCKSSQSLLNSGNQKKYLTWYQQKPGQAPRLLIYWASTRESGIPARFSGSGSGTDFTLTISSLEPEDFAVYYCQNDYGFPLTFGQGTKVEIK

SEQ ID NO: 1202 - protein, 113 aa, synthetic construct
  REGION 1..113: note = Description of Artificial Sequence: Synthetic polypeptide
  REGION 1..113: note = Synthetic Construct
EIVMTQSPATLSVSPGERATLSCKSSQSLLNSGNQKKYLTWYQQKPGQAPRLLIYWASTRESGIPARFSGSGSGTEFTLTISSLQSEDFAVYYCQNDYGFPLTFGQGTKVEIK

SEQ ID NO: 1203 - protein, 113 aa, synthetic construct
  REGION 1..113: note = Description of Artificial Sequence: Synthetic polypeptide
  REGION 1..113: note = Synthetic Construct
DIQMTQSPSTLSASVGDRVTITCKSSQSLLNSGNQKKYLTWYQQKPGKAPKLLIYWASTRESGVPSRFSGSGSGTEFTLTISSLQPDDFATYYCQNDYGFPLTFGQGTKVEIK

SEQ ID NO: 1204 - protein, 113 aa, synthetic construct
  REGION 1..113: note = Description of Artificial Sequence: Synthetic polypeptide
  REGION 1..113: note = Synthetic Construct
EIVLTQSPGTLSLSPGERATLSCKSSQSLLNSGNQKKYLTWYQQKPGQAPRLLIYWASTRESGIPDRFSGSGSGTDFTLTISRLEPEDFAVYYCQNDYGFPLTFGQGTKVEIK

SEQ ID NO: 1205 - protein, 113 aa, synthetic construct
  REGION 1..113: note = Description of Artificial Sequence: Synthetic polypeptide
  REGION 1..113: note = Synthetic Construct
DIQLTQSPSFLSASVGDRVTITCKSSQSLLNSGNQKKYLTWYQQKPGKAPKLLIYWASTRESGVPSRFSGSGSGTEFTLTISSLQPEDFATYYCQNDYGFPLTFGQGTKVEIK

SEQ ID NO: 1206 - protein, 113 aa, synthetic construct
  REGION 1..113: note = Description of Artificial Sequence: Synthetic polypeptide
  REGION 1..113: note = Synthetic Construct
DIQMTQSPSSLSASVGDRVTITCKSSQSLLNSGNQKKYLTWYQQKPGKAPKLLIYWASTRESGVPSRFSGSGSGTDFTLTISSLQPEDFATYYCQNDYGFPLTFGQGTKVEIK

SEQ ID NO: 1207 - protein, 109 aa, synthetic construct
  REGION 1..109: note = Description of Artificial Sequence: Synthetic polypeptide
  REGION 1..109: note = Synthetic Construct
TQSPSSLAVSVGEKVTMTCKSSQSLLYSGNQKNFLAWYQQKPGQSPKLLIYWASTRESGVPDRFTGSGSGTDFTLTISTVKAEDLAVYYCQQYYSYPFTFGSGTKLEIK

SEQ ID NO: 1208 - protein, 113 aa, synthetic construct
  REGION 1..113: note = Description of Artificial Sequence: Synthetic polypeptide
  REGION 1..113: note = Synthetic Construct
DIVMTQSPDSLAVSLGERATINCKSSQSLLYSGNQKNFLAWYQQKPGQPPKLLIYWASTRESGVPDRFSGSGSGTDFTLTISSLQAEDVAVYYCQQYYSYPFTFGQGTKVEIK

SEQ ID NO: 1209 - protein, 113 aa, synthetic construct
  REGION 1..113: note = Description of Artificial Sequence: Synthetic polypeptide
  REGION 1..113: note = Synthetic Construct
DIVMTQSPLSLPVTPGEPASISCKSSQSLLYSGNQKNFLAWYLQKPGQSPQLLIYWASTRESGVPDRFSGSGSGTDFTLKISRVEAEDVGVYYCQQYYSYPFTFGQGTKVEIK

SEQ ID NO: 1210 - protein, 113 aa, synthetic construct
  REGION 1..113: note = Description of Artificial Sequence: Synthetic polypeptide
  REGION 1..113: note = Synthetic Construct
DVVMTQSPLSLPVTLGQPASISCKSSQSLLYSGNQKNFLAWFQQRPGQSPRRLIYWASTRESGVPDRFSGSGSGTDFTLKISRVEAEDVGVYYCQQYYSYPFTFGQGTKVEIK

SEQ ID NO: 1211 - protein, 113 aa, synthetic construct
  REGION 1..113: note = Description of Artificial Sequence: Synthetic polypeptide
  REGION 1..113: note = Synthetic Construct
DIQLTQSPSFLSASVGDRVTITCKSSQSLLYSGNQKNFLAWYQQKPGKAPKLLIYWASTRESGVPSRFSGSGSGTEFTLTISSLQPEDFATYYCQQYYSYPFTFGQGTKVEIK

SEQ ID NO: 1212 - protein, 113 aa, synthetic construct
  REGION 1..113: note = Description of Artificial Sequence: Synthetic polypeptide
  REGION 1..113: note = Synthetic Construct
DIQMTQSPSTLSASVGDRVTITCKSSQSLLYSGNQKNFLAWYQQKPGKAPKLLIYWASTRESGVPSRFSGSGSGTEFTLTISSLQPDDFATYYCQQYYSYPFTFGQGTKVEIK

SEQ ID NO: 1213 - protein, 113 aa, synthetic construct
  REGION 1..113: note = Description of Artificial Sequence: Synthetic polypeptide
  REGION 1..113: note = Synthetic Construct
EIVMTQSPATLSVSPGERATLSCKSSQSLLYSGNQKNFLAWYQQKPGQAPRLLIYWASTRESGIPARFSGSGSGTEFTLTISSLQSEDFAVYYCQQYYSYPFTFGQGTKVEIK

SEQ ID NO: 1214 - protein, 113 aa, synthetic construct
  REGION 1..113: note = Description of Artificial Sequence: Synthetic polypeptide
  REGION 1..113: note = Synthetic Construct
DIQMTQSPSSLSASVGDRVTITCKSSQSLLYSGNQKNFLAWYQQKPGKAPKLLIYWASTRESGVPSRFSGSGSGTDFTFTISSLQPEDIATYYCQQYYSYPFTFGQGTKVEIK

SEQ ID NO: 1215 - protein, 113 aa, synthetic construct
  REGION 1..113: note = Description of Artificial Sequence: Synthetic polypeptide
  REGION 1..113: note = Synthetic Construct
EIVLTQSPATLSLSPGERATLSCKSSQSLLYSGNQKNFLAWYQQKPGQAPRLLIYWASTRESGIPARFSGSGSGTDFTLTISSLEPEDFAVYYCQQYYSYPFTFGQGTKVEIK

SEQ ID NO: 1216 - protein, 113 aa, synthetic construct
  REGION 1..113: note = Description of Artificial Sequence: Synthetic polypeptide
  REGION 1..113: note = Synthetic Construct
DIQMTQSPSSLSASVGDRVTITCKSSQSLLYSGNQKNFLAWYQQKPGKAPKLLIYWASTRESGVPSRFSGSGSGTDFTLTISSLQPEDFATYYCQQYYSYPFTFGQGTKVEIK

SEQ ID NO: 1217 - protein, 113 aa, synthetic construct
  REGION 1..113: note = Description of Artificial Sequence: Synthetic polypeptide
  REGION 1..113: note = Synthetic Construct
EIVLTQSPGTLSLSPGERATLSCKSSQSLLYSGNQKNFLAWYQQKPGQAPRLLIYWASTRESGIPDRFSGSGSGTDFTLTISRLEPEDFAVYYCQQYYSYPFTFGQGTKVEIK

SEQ ID NO: 1218 - protein, 111 aa, synthetic construct
  REGION 1..111: note = Description of Artificial Sequence: Synthetic polypeptide
  REGION 1..111: note = Synthetic Construct
TMSQSPSSLAVSVGEKVTMSCKSSQSLLYSSDQKNYLAWYQQKPGQSPKLLIYWASTRESGVPDRFTGSGSGTDFTLTISSVKAEDLAVYCCQQYYSYPLTFGAGTKLELK

SEQ ID NO: 1219 - protein, 119 aa, synthetic construct
  REGION 1..119: note = Description of Artificial Sequence: Synthetic polypeptide
  REGION 1..119: note = Synthetic Construct
EVKLVESGGGLVKPGGSLKLSCAASGFTLSSYAMSWVRQTPEKRLEWVASISRGGSTYYPDSVQGRFTFSRDNARNILYLQMSSLRSEDTAMYYCTRGYGYYRTPFANWGQGTLVTVSA

SEQ ID NO: 1220 - protein, 119 aa, synthetic construct
  REGION 1..119: note = Description of Artificial Sequence: Synthetic polypeptide
  REGION 1..119: note = Synthetic Construct
QVQLQESGPGLVKPSETLSLTCTVSGFTLSSYAMSWIRQPPGKGLEWVASISRGGSTYYPPSLKSRVTISVDTSKNQFSLKLSSVTAADTAVYYCTRGYGYYRTPFANWGQGTLVTVSS

SEQ ID NO: 1221 - protein, 119 aa, synthetic construct
  REGION 1..119: note = Description of Artificial Sequence: Synthetic polypeptide
  REGION 1..119: note = Synthetic Construct
EVQLLESGGGLVQPGGSLRLSCAASGFTLSSYAMSWVRQAPGKGLEWVASISRGGSTYYPDSVKGRFTISRDNSKNTLYLQMNSLRAEDTAVYYCTRGYGYYRTPFANWGQGTLVTVSS

SEQ ID NO: 1222 - protein, 119 aa, synthetic construct
  REGION 1..119: note = Description of Artificial Sequence: Synthetic polypeptide
  REGION 1..119: note = Synthetic Construct
EVQLVESGGGLVQPGGSLRLSCAASGFTLSSYAMSWVRQAPGKGLEWVASISRGGSTYYPDSVKGRFTISRDNAKNSLYLQMNSLRAEDTAVYYCTRGYGYYRTPFANWGQGTLVTVSS

SEQ ID NO: 1223 - protein, 119 aa, synthetic construct
  REGION 1..119: note = Description of Artificial Sequence: Synthetic polypeptide
  REGION 1..119: note = Synthetic Construct
QVQLVESGGGVVQPGRSLRLSCAASGFTLSSYAMSWVRQAPGKGLEWVASISRGGSTYYPDSVKGRFTISRDNSKNTLYLQMNSLRAEDTAVYYCTRGYGYYRTPFANWGQGTLVTVSS

SEQ ID NO: 1224 - protein, 119 aa, synthetic construct
  REGION 1..119: note = Description of Artificial Sequence: Synthetic polypeptide
  REGION 1..119: note = Synthetic Construct
QVQLVQSGAEVKKPGSSVKVSCKASGFTLSSYAMSWVRQAPGQGLEWVASISRGGSTYYPQKFQGRVTITADESTSTAYMELSSLRSEDTAVYYCTRGYGYYRTPFANWGQGTLVTVSS

SEQ ID NO: 1225 - protein, 119 aa, synthetic construct
  REGION 1..119: note = Description of Artificial Sequence: Synthetic polypeptide
  REGION 1..119: note = Synthetic Construct
QVQLVQSGAEVKKPGASVKVSCKASGFTLSSYAMSWVRQAPGQGLEWVASISRGGSTYYPQKFQGRVTMTRDTSTSTVYMELSSLRSEDTAVYYCTRGYGYYRTPFANWGQGTLVTVSS

SEQ ID NO: 1226 - protein, 119 aa, synthetic construct
  REGION 1..119: note = Description of Artificial Sequence: Synthetic polypeptide
  REGION 1..119: note = Synthetic Construct
EVQLVQSGAEVKKPGESLKISCKGSGFTLSSYAMSWVRQMPGKGLEWVASISRGGSTYYPPSFQGQVTISADKSISTAYLQWSSLKASDTAMYYCTRGYGYYRTPFANWGQGTLVTVSS

SEQ ID NO: 1227 - protein, 119 aa, synthetic construct
  REGION 1..119: note = Description of Artificial Sequence: Synthetic polypeptide
  REGION 1..119: note = Synthetic Construct
QLQLQESGPGLVKPSETLSLTCTVSGFTLSSYAMSWIRQPPGKGLEWVASISRGGSTYYPPSLKSRVTISVDTSKNQFSLKLSSVTAADTAVYYCTRGYGYYRTPFANWGQGTLVTVSS

SEQ ID NO: 1228 - protein, 119 aa, synthetic construct
  REGION 1..119: note = Description of Artificial Sequence: Synthetic polypeptide
  REGION 1..119: note = Synthetic Construct
QVQLQESGPGLVKPSQTLSLTCTVSGFTLSSYAMSWIRQPPGKGLEWVASISRGGSTYYPPSLKSRVTISVDTSKNQFSLKLSSVTAADTAVYYCTRGYGYYRTPFANWGQGTLVTVSS

SEQ ID NO: 1229 - protein, 119 aa, synthetic construct
  REGION 1..119: note = Description of Artificial Sequence: Synthetic polypeptide
  REGION 1..119: note = Synthetic Construct
EVQLQQSGPELVKPGTSVKISCKTSGYTFTEYTMHWVKQSHGKSLEWIGGINPNNGGTSYSQKFKGKASLTVDKSSSTAYMELHSLASDDSAVYYCARGGSHYYAMDYWGQGTSVTVSS

SEQ ID NO: 1230 - protein, 119 aa, synthetic construct
  REGION 1..119: note = Description of Artificial Sequence: Synthetic polypeptide
  REGION 1..119: note = Synthetic Construct
QVQLVQSGAEVKKPGASVKVSCKASGYTFTEYTMHWVRQAPGQGLEWIGGINPNNGGTSYSQKFQGRVTMTRDTSTSTVYMELSSLRSEDTAVYYCARGGSHYYAMDYWGQGTLVTVSS

SEQ ID NO: 1231 - protein, 119 aa, synthetic construct
  REGION 1..119: note = Description of Artificial Sequence: Synthetic polypeptide
  REGION 1..119: note = Synthetic Construct
EVQLVQSGAEVKKPGESLKISCKGSGYTFTEYTMHWVRQMPGKGLEWIGGINPNNGGTSYSPSFQGQVTISADKSISTAYLQWSSLKASDTAMYYCARGGSHYYAMDYWGQGTLVTVSS

SEQ ID NO: 1232 - protein, 119 aa, synthetic construct
  REGION 1..119: note = Description of Artificial Sequence: Synthetic polypeptide
  REGION 1..119: note = Synthetic Construct
QVQLVQSGAEVKKPGSSVKVSCKASGYTFTEYTMHWVRQAPGQGLEWIGGINPNNGGTSYSQKFQGRVTITADESTSTAYMELSSLRSEDTAVYYCARGGSHYYAMDYWGQGTLVTVSS

SEQ ID NO: 1233 - protein, 119 aa, synthetic construct
  REGION 1..119: note = Description of Artificial Sequence: Synthetic polypeptide
  REGION 1..119: note = Synthetic Construct
EVQLLESGGGLVQPGGSLRLSCAASGYTFTEYTMHWVRQAPGKGLEWIGGINPNNGGTSYSDSVKGRFTISRDNSKNTLYLQMNSLRAEDTAVYYCARGGSHYYAMDYWGQGTLVTVSS

SEQ ID NO: 1234 - protein, 119 aa, synthetic construct
  REGION 1..119: note = Description of Artificial Sequence: Synthetic polypeptide
  REGION 1..119: note = Synthetic Construct
QVQLVESGGGVVQPGRSLRLSCAASGYTFTEYTMHWVRQAPGKGLEWIGGINPNNGGTSYSDSVKGRFTISRDNSKNTLYLQMNSLRAEDTAVYYCARGGSHYYAMDYWGQGTLVTVSS

SEQ ID NO: 1235 - protein, 119 aa, synthetic construct
  REGION 1..119: note = Description of Artificial Sequence: Synthetic polypeptide
  REGION 1..119: note = Synthetic Construct
EVQLVESGGGLVQPGGSLRLSCAASGYTFTEYTMHWVRQAPGKGLEWIGGINPNNGGTSYSDSVKGRFTISRDNAKNSLYLQMNSLRAEDTAVYYCARGGSHYYAMDYWGQGTLVTVSS

SEQ ID NO: 1236 - protein, 119 aa, synthetic construct
  REGION 1..119: note = Description of Artificial Sequence: Synthetic polypeptide
  REGION 1..119: note = Synthetic Construct
QVQLQESGPGLVKPSETLSLTCTVSGYTFTEYTMHWIRQPPGKGLEWIGGINPNNGGTSYSPSLKSRVTISVDTSKNQFSLKLSSVTAADTAVYYCARGGSHYYAMDYWGQGTLVTVSS

SEQ ID NO: 1237 - protein, 119 aa, synthetic construct
  REGION 1..119: note = Description of Artificial Sequence: Synthetic polypeptide
  REGION 1..119: note = Synthetic Construct
EVQLVESGGGLVKPGGSLRLSCAASGYTFTEYTMHWVRQAPGKGLEWIGGINPNNGGTSYSAPVKGRFTISRDDSKNTLYLQMNSLKTEDTAVYYCARGGSHYYAMDYWGQGTLVTVSS

SEQ ID NO: 1238 - protein, 119 aa, synthetic construct
  REGION 1..119: note = Description of Artificial Sequence: Synthetic polypeptide
  REGION 1..119: note = Synthetic Construct
QLQLQESGPGLVKPSETLSLTCTVSGYTFTEYTMHWIRQPPGKGLEWIGGINPNNGGTSYSPSLKSRVTISVDTSKNQFSLKLSSVTAADTAVYYCARGGSHYYAMDYWGQGTLVTVSS

SEQ ID NO: 1239 - protein, 125 aa, synthetic construct
  REGION 1..125: note = Description of Artificial Sequence: Synthetic polypeptide
  REGION 1..125: note = Synthetic Construct
QVQLQQSGAELVRPGASVTLSCKASGYTFTDYEMHWVKQTPVHGLEWIGVIDPETGGTAYNQKFKGKAILTADKSSSTAYMELRSLTSEDSAVYYCTSPDYYGSSYPLYYAMDYWGQGTSVTVSS

SEQ ID NO: 1240 - protein, 125 aa, synthetic construct
  REGION 1..125: note = Description of Artificial Sequence: Synthetic polypeptide
  REGION 1..125: note = Synthetic Construct
QVQLVQSGAEVKKPGASVKVSCKASGYTFTDYEMHWVRQAPGQGLEWIGVIDPETGGTAYNQKFQGRVTMTRDTSTSTVYMELSSLRSEDTAVYYCTSPDYYGSSYPLYYAMDYWGQGTLVTVSS

SEQ ID NO: 1241 - protein, 125 aa, synthetic construct
  REGION 1..125: note = Description of Artificial Sequence: Synthetic polypeptide
  REGION 1..125: note = Synthetic Construct
EVQLVQSGAEVKKPGESLKISCKGSGYTFTDYEMHWVRQMPGKGLEWIGVIDPETGGTAYNPSFQGQVTISADKSISTAYLQWSSLKASDTAMYYCTSPDYYGSSYPLYYAMDYWGQGTLVTVSS

SEQ ID NO: 1242 - protein, 125 aa, synthetic construct
  REGION 1..125: note = Description of Artificial Sequence: Synthetic polypeptide
  REGION 1..125: note = Synthetic Construct
QVQLVESGGGVVQPGRSLRLSCAASGYTFTDYEMHWVRQAPGKGLEWIGVIDPETGGTAYNDSVKGRFTISRDNSKNTLYLQMNSLRAEDTAVYYCTSPDYYGSSYPLYYAMDYWGQGTLVTVSS

SEQ ID NO: 1243 - protein, 125 aa, synthetic construct
  REGION 1..125: note = Description of Artificial Sequence: Synthetic polypeptide
  REGION 1..125: note = Synthetic Construct
EVQLLESGGGLVQPGGSLRLSCAASGYTFTDYEMHWVRQAPGKGLEWIGVIDPETGGTAYNDSVKGRFTISRDNSKNTLYLQMNSLRAEDTAVYYCTSPDYYGSSYPLYYAMDYWGQGTLVTVSS

SEQ ID NO: 1244 - protein, 125 aa, synthetic construct
  REGION 1..125: note = Description of Artificial Sequence: Synthetic polypeptide
  REGION 1..125: note = Synthetic Construct
QVQLVQSGAEVKKPGSSVKVSCKASGYTFTDYEMHWVRQAPGQGLEWIGVIDPETGGTAYNQKFQGRVTITADESTSTAYMELSSLRSEDTAVYYCTSPDYYGSSYPLYYAMDYWGQGTLVTVSS

SEQ ID NO: 1245 - protein, 125 aa, synthetic construct
  REGION 1..125: note = Description of Artificial Sequence: Synthetic polypeptide
  REGION 1..125: note = Synthetic Construct
EVQLVESGGGLVQPGGSLRLSCAASGYTFTDYEMHWVRQAPGKGLEWIGVIDPETGGTAYNDSVKGRFTISRDNAKNSLYLQMNSLRAEDTAVYYCTSPDYYGSSYPLYYAMDYWGQGTLVTVSS

SEQ ID NO: 1246 - protein, 125 aa, synthetic construct
  REGION 1..125: note = Description of Artificial Sequence: Synthetic polypeptide
  REGION 1..125: note = Synthetic Construct
QVQLQESGPGLVKPSETLSLTCTVSGYTFTDYEMHWIRQPPGKGLEWIGVIDPETGGTAYNPSLKSRVTISVDTSKNQFSLKLSSVTAADTAVYYCTSPDYYGSSYPLYYAMDYWGQGTLVTVSS

SEQ ID NO: 1247 - protein, 125 aa, synthetic construct
  REGION 1..125: note = Description of Artificial Sequence: Synthetic polypeptide
  REGION 1..125: note = Synthetic Construct
EVQLVESGGGLVKPGGSLRLSCAASGYTFTDYEMHWVRQAPGKGLEWIGVIDPETGGTAYNAPVKGRFTISRDDSKNTLYLQMNSLKTEDTAVYYCTSPDYYGSSYPLYYAMDYWGQGTLVTVSS

SEQ ID NO: 1248 - protein, 125 aa, synthetic construct
  REGION 1..125: note = Description of Artificial Sequence: Synthetic polypeptide
  REGION 1..125: note = Synthetic Construct
QLQLQESGPGLVKPSETLSLTCTVSGYTFTDYEMHWIRQPPGKGLEWIGVIDPETGGTAYNPSLKSRVTISVDTSKNQFSLKLSSVTAADTAVYYCTSPDYYGSSYPLYYAMDYWGQGTLVTVSS

SEQ ID NO: 1249 - protein, 116 aa, synthetic construct
  REGION 1..116: note = Description of Artificial Sequence: Synthetic polypeptide
  REGION 1..116: note = Synthetic Construct
EVKLEESGGGLVQPGGSMKLSCAASGFTFSDAWMGWVRQSPEKGLEWVAEIRDKVKNHATYYAESVKGRFTISRDDSKSTVYLQMNTLRADDTGIYYCRLGVFDYWGQGTTLTVSS

SEQ ID NO: 1250 - protein, 116 aa, synthetic construct
  REGION 1..116: note = Description of Artificial Sequence: Synthetic polypeptide
  REGION 1..116: note = Synthetic Construct
EVQLVESGGGLVKPGGSLRLSCAASGFTFSDAWMGWVRQAPGKGLEWVAEIRDKVKNHATYYAAPVKGRFTISRDDSKNTLYLQMNSLKTEDTAVYYCRLGVFDYWGQGTLVTVSS

SEQ ID NO: 1251 - protein, 116 aa, synthetic construct
  REGION 1..116: note = Description of Artificial Sequence: Synthetic polypeptide
  REGION 1..116: note = Synthetic Construct
EVQLVESGGGLVQPGGSLRLSCAASGFTFSDAWMGWVRQAPGKGLEWVAEIRDKVKNHATYYADSVKGRFTISRDNAKNSLYLQMNSLRAEDTAVYYCRLGVFDYWGQGTLVTVSS

SEQ ID NO: 1252 - protein, 116 aa, synthetic construct
  REGION 1..116: note = Description of Artificial Sequence: Synthetic polypeptide
  REGION 1..116: note = Synthetic Construct
EVQLLESGGGLVQPGGSLRLSCAASGFTFSDAWMGWVRQAPGKGLEWVAEIRDKVKNHATYYADSVKGRFTISRDNSKNTLYLQMNSLRAEDTAVYYCRLGVFDYWGQGTLVTVSS

SEQ ID NO: 1253 - protein, 116 aa, synthetic construct
  REGION 1..116: note = Description of Artificial Sequence: Synthetic polypeptide
  REGION 1..116: note = Synthetic Construct
QVQLVESGGGVVQPGRSLRLSCAASGFTFSDAWMGWVRQAPGKGLEWVAEIRDKVKNHATYYADSVKGRFTISRDNSKNTLYLQMNSLRAEDTAVYYCRLGVFDYWGQGTLVTVSS

SEQ ID NO: 1254 - protein, 116 aa, synthetic construct
  REGION 1..116: note = Description of Artificial Sequence: Synthetic polypeptide
  REGION 1..116: note = Synthetic Construct
QVQLVQSGAEVKKPGSSVKVSCKASGFTFSDAWMGWVRQAPGQGLEWVAEIRDKVKNHATYYAQKFQGRVTITADESTSTAYMELSSLRSEDTAVYYCRLGVFDYWGQGTLVTVSS

SEQ ID NO: 1255 - protein, 116 aa, synthetic construct
  REGION 1..116: note = Description of Artificial Sequence: Synthetic polypeptide
  REGION 1..116: note = Synthetic Construct
QVQLVQSGAEVKKPGASVKVSCKASGFTFSDAWMGWVRQAPGQGLEWVAEIRDKVKNHATYYAQKFQGRVTMTRDTSTSTVYMELSSLRSEDTAVYYCRLGVFDYWGQGTLVTVSS

SEQ ID NO: 1256 - protein, 116 aa, synthetic construct
  REGION 1..116: note = Description of Artificial Sequence: Synthetic polypeptide
  REGION 1..116: note = Synthetic Construct
EVQLVQSGAEVKKPGESLKISCKGSGFTFSDAWMGWVRQMPGKGLEWVAEIRDKVKNHATYYAPSFQGQVTISADKSISTAYLQWSSLKASDTAMYYCRLGVFDYWGQGTLVTVSS

SEQ ID NO: 1257 - protein, 116 aa, synthetic construct
  REGION 1..116: note = Description of Artificial Sequence: Synthetic polypeptide
  REGION 1..116: note = Synthetic Construct
QVQLQESGPGLVKPSETLSLTCTVSGFTFSDAWMGWIRQPPGKGLEWVAEIRDKVKNHATYYAPSLKSRVTISVDTSKNQFSLKLSSVTAADTAVYYCRLGVFDYWGQGTLVTVSS

SEQ ID NO: 1258 - protein, 116 aa, synthetic construct
  REGION 1..116: note = Description of Artificial Sequence: Synthetic polypeptide
  REGION 1..116: note = Synthetic Construct
QLQLQESGPGLVKPSETLSLTCTVSGFTFSDAWMGWIRQPPGKGLEWVAEIRDKVKNHATYYAPSLKSRVTISVDTSKNQFSLKLSSVTAADTAVYYCRLGVFDYWGQGTLVTVSS

SEQ ID NO: 1259 - protein, 122 aa, synthetic construct
  REGION 1..122: note = Description of Artificial Sequence: Synthetic polypeptide
  REGION 1..122: note = Synthetic Construct
EVQLVESGGGLVQPKGSLKLSCAASGFSFNTYAMNWVRQAPGKGLEWIARIRSKSNNYATYYADSVKDRITCSRDDSENMFYLQLSSLKTEDTAMYYCVRHGDGNLWYIDVWGTGTTVTVST

SEQ ID NO: 1260 - protein, 122 aa, synthetic construct
  REGION 1..122: note = Description of Artificial Sequence: Synthetic polypeptide
  REGION 1..122: note = Synthetic Construct
EVQLVESGGGLVKPGGSLRLSCAASGFSFNTYAMNWVRQAPGKGLEWIARIRSKSNNYATYYAAPVKGRFTISRDDSKNTLYLQMNSLKTEDTAVYYCVRHGDGNLWYIDVWGQGTLVTVSS

SEQ ID NO: 1261 - protein, 122 aa, synthetic construct
  REGION 1..122: note = Description of Artificial Sequence: Synthetic polypeptide
  REGION 1..122: note = Synthetic Construct
EVQLVESGGGLVQPGGSLRLSCAASGFSFNTYAMNWVRQAPGKGLEWIARIRSKSNNYATYYADSVKGRFTISRDNAKNSLYLQMNSLRAEDTAVYYCVRHGDGNLWYIDVWGQGTLVTVSS

SEQ ID NO: 1262 - protein, 122 aa, synthetic construct
  REGION 1..122: note = Description of Artificial Sequence: Synthetic polypeptide
  REGION 1..122: note = Synthetic Construct
EVQLLESGGGLVQPGGSLRLSCAASGFSFNTYAMNWVRQAPGKGLEWIARIRSKSNNYATYYADSVKGRFTISRDNSKNTLYLQMNSLRAEDTAVYYCVRHGDGNLWYIDVWGQGTLVTVSS

SEQ ID NO: 1263 - protein, 122 aa, synthetic construct
  REGION 1..122: note = Description of Artificial Sequence: Synthetic polypeptide
  REGION 1..122: note = Synthetic Construct
QVQLVESGGGVVQPGRSLRLSCAASGFSFNTYAMNWVRQAPGKGLEWIARIRSKSNNYATYYADSVKGRFTISRDNSKNTLYLQMNSLRAEDTAVYYCVRHGDGNLWYIDVWGQGTLVTVSS

SEQ ID NO: 1264 - protein, 122 aa, synthetic construct
  REGION 1..122: note = Description of Artificial Sequence: Synthetic polypeptide
  REGION 1..122: note = Synthetic Construct
QVQLVQSGAEVKKPGSSVKVSCKASGFSFNTYAMNWVRQAPGQGLEWIARIRSKSNNYATYYAQKFQGRVTITADESTSTAYMELSSLRSEDTAVYYCVRHGDGNLWYIDVWGQGTLVTVSS

SEQ ID NO: 1265 - protein, 122 aa, synthetic construct
  REGION 1..122: note = Description of Artificial Sequence: Synthetic polypeptide
  REGION 1..122: note = Synthetic Construct
EVQLVQSGAEVKKPGESLKISCKGSGFSFNTYAMNWVRQMPGKGLEWIARIRSKSNNYATYYAPSFQGQVTISADKSISTAYLQWSSLKASDTAMYYCVRHGDGNLWYIDVWGQGTLVTVSS

SEQ ID NO: 1266 - protein, 122 aa, synthetic construct
  REGION 1..122: note = Description of Artificial Sequence: Synthetic polypeptide
  REGION 1..122: note = Synthetic Construct
QVQLVQSGAEVKKPGASVKVSCKASGFSFNTYAMNWVRQAPGQGLEWIARIRSKSNNYATYYAQKFQGRVTMTRDTSTSTVYMELSSLRSEDTAVYYCVRHGDGNLWYIDVWGQGTLVTVSS

SEQ ID NO: 1267 - protein, 122 aa, synthetic construct
  REGION 1..122: note = Description of Artificial Sequence: Synthetic polypeptide
  REGION 1..122: note = Synthetic Construct
QVQLQESGPGLVKPSETLSLTCTVSGFSFNTYAMNWIRQPPGKGLEWIARIRSKSNNYATYYAPSLKSRVTISVDTSKNQFSLKLSSVTAADTAVYYCVRHGDGNLWYIDVWGQGTLVTVSS

SEQ ID NO: 1268 - protein, 122 aa, synthetic construct
  REGION 1..122: note = Description of Artificial Sequence: Synthetic polypeptide
  REGION 1..122: note = Synthetic Construct
QVQLQESGPGLVKPSQTLSLTCTVSGFSFNTYAMNWIRQPPGKGLEWIARIRSKSNNYATYYAPSLKSRVTISVDTSKNQFSLKLSSVTAADTAVYYCVRHGDGNLWYIDVWGQGTLVTVSS

SEQ ID NO: 1269 - protein, 116 aa, synthetic construct
  REGION 1..116: note = Description of Artificial Sequence: Synthetic polypeptide
  REGION 1..116: note = Synthetic Construct
QVQLQQSGAELVKPGASVKLSCKASGYTVSRYWMHWVKQRPGRGLEWIGRIDPNSGGTKYNEKFKTKATLTVDKPSSTAYMQVSSLTSEDSAVYYCVLTGTDFDYWGQGTTLTVSS

SEQ ID NO: 1270 - protein, 116 aa, synthetic construct
  REGION 1..116: note = Description of Artificial Sequence: Synthetic polypeptide
  REGION 1..116: note = Synthetic Construct
QVQLVQSGAEVKKPGASVKVSCKASGYTVSRYWMHWVRQAPGQGLEWIGRIDPNSGGTKYNQKFQGRVTMTRDTSTSTVYMELSSLRSEDTAVYYCVLTGTDFDYWGQGTLVTVSS

SEQ ID NO: 1271 - protein, 116 aa, synthetic construct
  REGION 1..116: note = Description of Artificial Sequence: Synthetic polypeptide
  REGION 1..116: note = Synthetic Construct
EVQLLESGGGLVQPGGSLRLSCAASGYTVSRYWMHWVRQAPGKGLEWIGRIDPNSGGTKYNDSVKGRFTISRDNSKNTLYLQMNSLRAEDTAVYYCVLTGTDFDYWGQGTLVTVSS

SEQ ID NO: 1272 - protein, 116 aa, synthetic construct
  REGION 1..116: note = Description of Artificial Sequence: Synthetic polypeptide
  REGION 1..116: note = Synthetic Construct
QVQLVQSGAEVKKPGSSVKVSCKASGYTVSRYWMHWVRQAPGQGLEWIGRIDPNSGGTKYNQKFQGRVTITADESTSTAYMELSSLRSEDTAVYYCVLTGTDFDYWGQGTLVTVSS

SEQ ID NO: 1273 - protein, 116 aa, synthetic construct
  REGION 1..116: note = Description of Artificial Sequence: Synthetic polypeptide
  REGION 1..116: note = Synthetic Construct
EVQLVQSGAEVKKPGESLKISCKGSGYTVSRYWMHWVRQMPGKGLEWIGRIDPNSGGTKYNPSFQGQVTISADKSISTAYLQWSSLKASDTAMYYCVLTGTDFDYWGQGTLVTVSS

SEQ ID NO: 1274 - protein, 116 aa, synthetic construct
  REGION 1..116: note = Description of Artificial Sequence: Synthetic polypeptide
  REGION 1..116: note = Synthetic Construct
EVQLVESGGGLVQPGGSLRLSCAASGYTVSRYWMHWVRQAPGKGLEWIGRIDPNSGGTKYNDSVKGRFTISRDNAKNSLYLQMNSLRAEDTAVYYCVLTGTDFDYWGQGTLVTVSS

SEQ ID NO: 1275 - protein, 116 aa, synthetic construct
  REGION 1..116: note = Description of Artificial Sequence: Synthetic polypeptide
  REGION 1..116: note = Synthetic Construct
QVQLVESGGGVVQPGRSLRLSCAASGYTVSRYWMHWVRQAPGKGLEWIGRIDPNSGGTKYNDSVKGRFTISRDNSKNTLYLQMNSLRAEDTAVYYCVLTGTDFDYWGQGTLVTVSS

SEQ ID NO: 1276 - protein, 116 aa, synthetic construct
  REGION 1..116: note = Description of Artificial Sequence: Synthetic polypeptide
  REGION 1..116: note = Synthetic Construct
QVQLQESGPGLVKPSETLSLTCTVSGYTVSRYWMHWIRQPPGKGLEWIGRIDPNSGGTKYNPSLKSRVTISVDTSKNQFSLKLSSVTAADTAVYYCVLTGTDFDYWGQGTLVTVSS

SEQ ID NO: 1277 - protein, 116 aa, synthetic construct
  REGION 1..116: note = Description of Artificial Sequence: Synthetic polypeptide
  REGION 1..116: note = Synthetic Construct
EVQLVESGGGLVKPGGSLRLSCAASGYTVSRYWMHWVRQAPGKGLEWIGRIDPNSGGTKYNAPVKGRFTISRDDSKNTLYLQMNSLKTEDTAVYYCVLTGTDFDYWGQGTLVTVSS

SEQ ID NO: 1278 - protein, 116 aa, synthetic construct
  REGION 1..116: note = Description of Artificial Sequence: Synthetic polypeptide
  REGION 1..116: note = Synthetic Construct
QVQLQESGPGLVKPSQTLSLTCTVSGYTVSRYWMHWIRQPPGKGLEWIGRIDPNSGGTKYNPSLKSRVTISVDTSKNQFSLKLSSVTAADTAVYYCVLTGTDFDYWGQGTLVTVSS

SEQ ID NO: 1279 - protein, 122 aa, synthetic construct
  REGION 1..122: note = Description of Artificial Sequence: Synthetic polypeptide
  REGION 1..122: note = Synthetic Construct
  VARIANT 1: note = Glutamic acid or Glutamine
XVQLVESGGGLVQPKGSLKLSCAASGFSFNTYAMNWVRQAPGKGLEWIARIRSKSNNYATYYADSVKDRFTCSRDDSENMFYLQLSSLKTEDTAIYYCVRHGDGNLWYIDVWGTGTTVTVSS

SEQ ID NO: 1280 - protein, 122 aa, synthetic construct
  REGION 1..122: note = Description of Artificial Sequence: Synthetic polypeptide
  REGION 1..122: note = Synthetic Construct
EVQLVESGGGLVQPKGSLKLSCAASGFSFNTYAMNWVRQAPGKGLEWIARIRSKSNNYATYYADSVKDRFTCSRDDSENMFYLQLSSLKTEDTAMYYCVRHGDGNLWYIDVWGTGTTVTVSS

SEQ ID NO: 1281 - protein, 120 aa, synthetic construct
  REGION 1..120: note = Description of Artificial Sequence: Synthetic polypeptide
  REGION 1..120: note = Synthetic Construct
QVQLQQSGAELVKPGASVKMSCKTSGYPFSNFWITWVKQRPGQGLVWIGDIYPGSDNSNYNEKFKTKATLTVDTSSSTAYMHLSSLTSEDSAVYFCAREAYYTNPGFAYWGQGTLVTVST

SEQ ID NO: 1282 - protein, 120 aa, synthetic construct
  REGION 1..120: note = Description of Artificial Sequence: Synthetic polypeptide
  REGION 1..120: note = Synthetic Construct
EVQLVQSGAEVKKPGESLKISCKGSGYPFSNFWITWVRQMPGKGLEWIGDIYPGSDNSNYNPSFQGQVTISADKSISTAYLQWSSLKASDTAMYYCAREAYYTNPGFAYWGQGTLVTVSS

SEQ ID NO: 1283 - protein, 120 aa, synthetic construct
  REGION 1..120: note = Description of Artificial Sequence: Synthetic polypeptide
  REGION 1..120: note = Synthetic Construct
QVQLVQSGAEVKKPGSSVKVSCKASGYPFSNFWITWVRQAPGQGLEWIGDIYPGSDNSNYNQKFQGRVTITADESTSTAYMELSSLRSEDTAVYYCAREAYYTNPGFAYWGQGTLVTVSS

SEQ ID NO: 1284 - protein, 120 aa, synthetic construct
  REGION 1..120: note = Description of Artificial Sequence: Synthetic polypeptide
  REGION 1..120: note = Synthetic Construct
QVQLVQSGAEVKKPGASVKVSCKASGYPFSNFWITWVRQAPGQGLEWIGDIYPGSDNSNYNQKFQGRVTMTRDTSTSTVYMELSSLRSEDTAVYYCAREAYYTNPGFAYWGQGTLVTVSS

SEQ ID NO: 1285 - protein, 120 aa, synthetic construct
  REGION 1..120: note = Description of Artificial Sequence: Synthetic polypeptide
  REGION 1..120: note = Synthetic Construct
EVQLVESGGGLVQPGGSLRLSCAASGYPFSNFWITWVRQAPGKGLEWIGDIYPGSDNSNYNDSVKGRFTISRDNAKNSLYLQMNSLRAEDTAVYYCAREAYYTNPGFAYWGQGTLVTVSS

SEQ ID NO: 1286 - protein, 120 aa, synthetic construct
  REGION 1..120: note = Description of Artificial Sequence: Synthetic polypeptide
  REGION 1..120: note = Synthetic Construct
QVQLVESGGGVVQPGRSLRLSCAASGYPFSNFWITWVRQAPGKGLEWIGDIYPGSDNSNYNDSVKGRFTISRDNSKNTLYLQMNSLRAEDTAVYYCAREAYYTNPGFAYWGQGTLVTVSS

SEQ ID NO: 1287 - protein, 120 aa, synthetic construct
  REGION 1..120: note = Description of Artificial Sequence: Synthetic polypeptide
  REGION 1..120: note = Synthetic Construct
EVQLLESGGGLVQPGGSLRLSCAASGYPFSNFWITWVRQAPGKGLEWIGDIYPGSDNSNYNDSVKGRFTISRDNSKNTLYLQMNSLRAEDTAVYYCAREAYYTNPGFAYWGQGTLVTVSS

SEQ ID NO: 1288 - protein, 120 aa, synthetic construct
  REGION 1..120: note = Description of Artificial Sequence: Synthetic polypeptide
  REGION 1..120: note = Synthetic Construct
QVQLQESGPGLVKPSETLSLTCTVSGYPFSNFWITWIRQPPGKGLEWIGDIYPGSDNSNYNPSLKSRVTISVDTSKNQFSLKLSSVTAADTAVYYCAREAYYTNPGFAYWGQGTLVTVSS

SEQ ID NO: 1289 - protein, 120 aa, synthetic construct
  REGION 1..120: note = Description of Artificial Sequence: Synthetic polypeptide
  REGION 1..120: note = Synthetic Construct
EVQLVESGGGLVKPGGSLRLSCAASGYPFSNFWITWVRQAPGKGLEWIGDIYPGSDNSNYNAPVKGRFTISRDDSKNTLYLQMNSLKTEDTAVYYCAREAYYTNPGFAYWGQGTLVTVSS

SEQ ID NO: 1290 - protein, 120 aa, synthetic construct
  REGION 1..120: note = Description of Artificial Sequence: Synthetic polypeptide
  REGION 1..120: note = Synthetic Construct
QLQLQESGPGLVKPSETLSLTCTVSGYPFSNFWITWIRQPPGKGLEWIGDIYPGSDNSNYNPSLKSRVTISVDTSKNQFSLKLSSVTAADTAVYYCAREAYYTNPGFAYWGQGTLVTVSS

SEQ ID NO: 1291 - protein, 120 aa, synthetic construct
  REGION 1..120: note = Description of Artificial Sequence: Synthetic polypeptide
  REGION 1..120: note = Synthetic Construct
  VARIANT 6..7: note = Glutamic acid or Glutamine
  VARIANT 11: note = Any naturally occurring amino acid
  VARIANT 18: note = Any Amino Acid
  VARIANT 19..20: note = Any naturally occurring amino acid
  VARIANT 24: note = Any naturally occurring amino acid
  VARIANT 72: note = Any naturally occurring amino acid
  VARIANT 83: note = Any naturally occurring amino acid
  VARIANT 87..88: note = Any naturally occurring amino acid
  VARIANT 90: note = Any naturally occurring amino acid
  VARIANT 98: note = Any naturally occurring amino acid
EVQLVXXGRGXSQGKGSXXXGRAXRCLTSNTYTQTGVPQGPGKGREWESVIRSKSNNFSTLYADSVKDRFTXSRDDSESLFYXQMSXXKXEDTAMYYXVRHKSNRYPGVYWGQGTIVTVS

SEQ ID NO: 1292 - protein, 121 aa, synthetic construct
  REGION 1..121: note = Description of Artificial Sequence: Synthetic polypeptide
  REGION 1..121: note = Synthetic Construct
EVQLVESGGGLVKPGGSLRLSCAASGLTSNTYTQTWVRQAPGKGLEWESVIRSKSNNFSTLYAAPVKGRFTISRDDSKNTLYLQMNSLKTEDTAVYYCVRHKSNRYPGVYWGQGTLVTVSS

SEQ ID NO: 1293 - protein, 121 aa, synthetic construct
  REGION 1..121: note = Description of Artificial Sequence: Synthetic polypeptide
  REGION 1..121: note = Synthetic Construct
QVQLVESGGGVVQPGRSLRLSCAASGLTSNTYTQTWVRQAPGKGLEWESVIRSKSNNFSTLYADSVKGRFTISRDNSKNTLYLQMNSLRAEDTAVYYCVRHKSNRYPGVYWGQGTLVTVSS

SEQ ID NO: 1294 - protein, 121 aa, synthetic construct
  REGION 1..121: note = Description of Artificial Sequence: Synthetic polypeptide
  REGION 1..121: note = Synthetic Construct
EVQLLESGGGLVQPGGSLRLSCAASGLTSNTYTQTWVRQAPGKGLEWESVIRSKSNNFSTLYADSVKGRFTISRDNSKNTLYLQMNSLRAEDTAVYYCVRHKSNRYPGVYWGQGTLVTVSS

SEQ ID NO: 1295 - protein, 121 aa, synthetic construct
  REGION 1..121: note = Description of Artificial Sequence: Synthetic polypeptide
  REGION 1..121: note = Synthetic Construct
QVQLVQSGAEVKKPGASVKVSCKASGLTSNTYTQTWVRQAPGQGLEWESVIRSKSNNFSTLYAQKFQGRVTMTRDTSTSTVYMELSSLRSEDTAVYYCVRHKSNRYPGVYWGQGTLVTVSS

SEQ ID NO: 1296 - protein, 121 aa, synthetic construct
  REGION 1..121: note = Description of Artificial Sequence: Synthetic polypeptide
  REGION 1..121: note = Synthetic Construct
EVQLVESGGGLVQPGGSLRLSCAASGLTSNTYTQTWVRQAPGKGLEWESVIRSKSNNFSTLYADSVKGRFTISRDNAKNSLYLQMNSLRAEDTAVYYCVRHKSNRYPGVYWGQGTLVTVSS

SEQ ID NO: 1297 - protein, 121 aa, synthetic construct
  REGION 1..121: note = Description of Artificial Sequence: Synthetic polypeptide
  REGION 1..121: note = Synthetic Construct
QVQLVQSGAEVKKPGSSVKVSCKASGLTSNTYTQTWVRQAPGQGLEWESVIRSKSNNFSTLYAQKFQGRVTITADESTSTAYMELSSLRSEDTAVYYCVRHKSNRYPGVYWGQGTLVTVSS

SEQ ID NO: 1298 - protein, 121 aa, synthetic construct
  REGION 1..121: note = Description of Artificial Sequence: Synthetic polypeptide
  REGION 1..121: note = Synthetic Construct
EVQLVQSGAEVKKPGESLKISCKGSGLTSNTYTQTWVRQMPGKGLEWESVIRSKSNNFSTLYAPSFQGQVTISADKSISTAYLQWSSLKASDTAMYYCVRHKSNRYPGVYWGQGTLVTVSS

SEQ ID NO: 1299 - protein, 121 aa, synthetic construct
  REGION 1..121: note = Description of Artificial Sequence: Synthetic polypeptide
  REGION 1..121: note = Synthetic Construct
QVQLQESGPGLVKPSETLSLTCTVSGLTSNTYTQTWIRQPPGKGLEWESVIRSKSNNFSTLYAPSLKSRVTISVDTSKNQFSLKLSSVTAADTAVYYCVRHKSNRYPGVYWGQGTLVTVSS

SEQ ID NO: 1300 - protein, 121 aa, synthetic construct
  REGION 1..121: note = Description of Artificial Sequence: Synthetic polypeptide
  REGION 1..121: note = Synthetic Construct
QLQLQESGPGLVKPSETLSLTCTVSGLTSNTYTQTWIRQPPGKGLEWESVIRSKSNNFSTLYAPSLKSRVTISVDTSKNQFSLKLSSVTAADTAVYYCVRHKSNRYPGVYWGQGTLVTVSS

SEQ ID NO: 1301 - protein, 122 aa, synthetic construct
  REGION 1..122: note = Description of Artificial Sequence: Synthetic polypeptide
  REGION 1..122: note = Synthetic Construct
EVKLEESGGGLVQPGGSMKLSCTASGFTFSDAWMDWVRQSPEKGLEWVAEIRNKVNNHATYYAESVKGRFTISRDDSKSTVYLQMNSLRTEDTGIYYCTSLYDGYYLRFAYWGQGTLVTVSA

SEQ ID NO: 1302 - protein, 122 aa, synthetic construct
  REGION 1..122: note = Description of Artificial Sequence: Synthetic polypeptide
  REGION 1..122: note = Synthetic Construct
EVQLVESGGGLVKPGGSLRLSCAASGFTFSDAWMDWVRQAPGKGLEWWVAEIRNKVNNHATYYAPVKGRFTISRDDSKNTLYLQMNSLKTEDTAVYYCCTSLYDGYYLRFAWGQGTLVTVSS

SEQ ID NO: 1303 - protein, 122 aa, synthetic construct
  REGION 1..122: note = Description of Artificial Sequence: Synthetic polypeptide
  REGION 1..122: note = Synthetic Construct
EVQLVESGGGLVQPGGSLRLSCAASGFTFSDAWMDWVRQAPGKGLEWWVAEIRNKVNNHATYYDSVKGRFTISRDNAKNSLYLQMNSLRAEDTAVYYCCTSLYDGYYLRFAWGQGTLVTVSS

SEQ ID NO: 1304 - protein, 122 aa, synthetic construct
  REGION 1..122: note = Description of Artificial Sequence: Synthetic polypeptide
  REGION 1..122: note = Synthetic Construct
EVQLLESGGGLVQPGGSLRLSCAASGFTFSDAWMDWVRQAPGKGLEWWVAEIRNKVNNHATYYDSVKGRFTISRDNSKNTLYLQMNSLRAEDTAVYYCCTSLYDGYYLRFAWGQGTLVTVSS

SEQ ID NO: 1305 - protein, 122 aa, synthetic construct
  REGION 1..122: note = Description of Artificial Sequence: Synthetic polypeptide
  REGION 1..122: note = Synthetic Construct
QVQLVESGGGVVQPGRSLRLSCAASGFTFSDAWMDWVRQAPGKGLEWWVAEIRNKVNNHATYYDSVKGRFTISRDNSKNTLYLQMNSLRAEDTAVYYCCTSLYDGYYLRFAWGQGTLVTVSS

SEQ ID NO: 1306 - protein, 122 aa, synthetic construct
  REGION 1..122: note = Description of Artificial Sequence: Synthetic polypeptide
  REGION 1..122: note = Synthetic Construct
QVQLVQSGAEVKKPGASVKVSCKASGFTFSDAWMDWVRQAPGQGLEWWVAEIRNKVNNHATYYQKFQGRVTMTRDTSTSTVYMELSSLRSEDTAVYYCCTSLYDGYYLRFAWGQGTLVTVSS

SEQ ID NO: 1307 - protein, 122 aa, synthetic construct
  REGION 1..122: note = Description of Artificial Sequence: Synthetic polypeptide
  REGION 1..122: note = Synthetic Construct
QVQLVQSGAEVKKPGSSVKVSCKASGFTFSDAWMDWVRQAPGQGLEWWVAEIRNKVNNHATYYQKFQGRVTITADESTSTAYMELSSLRSEDTAVYYCCTSLYDGYYLRFAWGQGTLVTVSS

SEQ ID NO: 1308 - protein, 122 aa, synthetic construct
  REGION 1..122: note = Description of Artificial Sequence: Synthetic polypeptide
  REGION 1..122: note = Synthetic Construct
EVQLVQSGAEVKKPGESLKISCKGSGFTFSDAWMDWVRQMPGKGLEWWVAEIRNKVNNHATYYPSFQGQVTISADKSISTAYLQWSSLKASDTAMYYCCTSLYDGYYLRFAWGQGTLVTVSS

SEQ ID NO: 1309 - protein, 122 aa, synthetic construct
  REGION 1..122: note = Description of Artificial Sequence: Synthetic polypeptide
  REGION 1..122: note = Synthetic Construct
QVQLQESGPGLVKPSETLSLTCTVSGFTFSDAWMDWIRQPPGKGLEWWVAEIRNKVNNHATYYPSLKSRVTISVDTSKNQFSLKLSSVTAADTAVYYCCTSLYDGYYLRFAWGQGTLVTVSS

SEQ ID NO: 1310 - protein, 122 aa, synthetic construct
  REGION 1..122: note = Description of Artificial Sequence: Synthetic polypeptide
  REGION 1..122: note = Synthetic Construct
QLQLQESGPGLVKPSETLSLTCTVSGFTFSDAWMDWIRQPPGKGLEWWVAEIRNKVNNHATYYPSLKSRVTISVDTSKNQFSLKLSSVTAADTAVYYCCTSLYDGYYLRFAWGQGTLVTVSS

SEQ ID NO: 1311 - protein, 102 aa, synthetic construct
  REGION 1..102: note = Description of Artificial Sequence: Synthetic polypeptide
  REGION 1..102: note = Synthetic Construct
  VARIANT 36: note = Glutamic acid or Glutamine
  VARIANT 67: note = Glutamic acid or Glutamine
  VARIANT 81: note = Any naturally occurring amino acid
  VARIANT 83: note = Any naturally occurring amino acid
LSCAASGFTFNTYSMNWVRQAPGKGLEWVAHIKTKXNNFATFYADSVKDRFTISRDDSESMLYLQMXNLKTEDTAMYYCVXHXSNNYPFAYWGQGTLVTVSA

SEQ ID NO: 1312 - protein, 121 aa, synthetic construct
  REGION 1..121: note = Description of Artificial Sequence: Synthetic polypeptide
  REGION 1..121: note = Synthetic Construct
  VARIANT 55: note = Glutamic acid or Glutamine
  VARIANT 100: note = Glutamic acid or Glutamine
  VARIANT 102: note = Any naturally occurring amino acid
EVQLVESGGGLVKPGGSLRLSCAASGFTFNTYSMNWVRQAPGKGLEWVAHIKTKXNNFATFYAAPVKGRFTISRDDSKNTLYLQMNSLKTEDTAVYYCVXHXSNNYPFAYWGQGTLVTVSS

SEQ ID NO: 1313 - protein, 121 aa, synthetic construct
  REGION 1..121: note = Description of Artificial Sequence: Synthetic polypeptide
  REGION 1..121: note = Synthetic Construct
  VARIANT 55: note = Glutamic acid or Glutamine
  VARIANT 100: note = Glutamic acid or Glutamine
  VARIANT 102: note = Any naturally occurring amino acid
EVQLVESGGGLVQPGGSLRLSCAASGFTFNTYSMNWVRQAPGKGLEWVAHIKTKXNNFATFYADSVKGRFTISRDNAKNSLYLQMNSLRAEDTAVYYCVXHXSNNYPFAYWGQGTLVTVSS

SEQ ID NO: 1314 - protein, 121 aa, synthetic construct
  REGION 1..121: note = Description of Artificial Sequence: Synthetic polypeptide
  REGION 1..121: note = Synthetic Construct
  VARIANT 55: note = Glutamic acid or Glutamine
  VARIANT 100: note = Glutamic acid or Glutamine
  VARIANT 102: note = Any naturally occurring amino acid
EVQLLESGGGLVQPGGSLRLSCAASGFTFNTYSMNWVRQAPGKGLEWVAHIKTKXNNFATFYADSVKGRFTISRDNSKNTLYLQMNSLRAEDTAVYYCVXHXSNNYPFAYWGQGTLVTVSS

SEQ ID NO: 1315 - protein, 121 aa, synthetic construct
  REGION 1..121: note = Description of Artificial Sequence: Synthetic polypeptide
  REGION 1..121: note = Synthetic Construct
  VARIANT 55: note = Glutamic acid or Glutamine
  VARIANT 100: note = Glutamic acid or Glutamine
  VARIANT 102: note = Any naturally occurring amino acid
QVQLVESGGGVVQPGRSLRLSCAASGFTFNTYSMNWVRQAPGKGLEWVAHIKTKXNNFATFYADSVKGRFTISRDNSKNTLYLQMNSLRAEDTAVYYCVXHXSNNYPFAYWGQGTLVTVSS

SEQ ID NO: 1316 - protein, 121 aa, synthetic construct
  REGION 1..121: note = Description of Artificial Sequence: Synthetic polypeptide
  REGION 1..121: note = Synthetic Construct
  VARIANT 55: note = Glutamic acid or Glutamine
  VARIANT 100: note = Glutamic acid or Glutamine
  VARIANT 102: note = Any naturally occurring amino acid
QVQLVQSGAEVKKPGASVKVSCKASGFTFNTYSMNWVRQAPGQGLEWVAHIKTKXNNFATFYAQKFQGRVTMTRDTSTSTVYMELSSLRSEDTAVYYCVXHXSNNYPFAYWGQGTLVTVSS

SEQ ID NO: 1317 - protein, 121 aa, synthetic construct
  REGION 1..121: note = Description of Artificial Sequence: Synthetic polypeptide
  REGION 1..121: note = Synthetic Construct
  VARIANT 55: note = Glutamic acid or Glutamine
  VARIANT 100: note = Glutamic acid or Glutamine
  VARIANT 102: note = Any naturally occurring amino acid
QVQLVQSGAEVKKPGSSVKVSCKASGFTFNTYSMNWVRQAPGQGLEWVAHIKTKXNNFATFYAQKFQGRVTITADESTSTAYMELSSLRSEDTAVYYCVXHXSNNYPFAYWGQGTLVTVSS

SEQ ID NO: 1318 - protein, 121 aa, synthetic construct
  REGION 1..121: note = Description of Artificial Sequence: Synthetic polypeptide
  REGION 1..121: note = Synthetic Construct
  VARIANT 55: note = Glutamic acid or Glutamine
  VARIANT 100: note = Glutamic acid or Glutamine
  VARIANT 102: note = Any naturally occurring amino acid
EVQLVQSGAEVKKPGESLKISCKGSGFTFNTYSMNWVRQMPGKGLEWVAHIKTKXNNFATFYAPSFQGQVTISADKSISTAYLQWSSLKASDTAMYYCVXHXSNNYPFAYWGQGTLVTVSS

SEQ ID NO: 1319 - protein, 121 aa, synthetic construct
  REGION 1..121: note = Description of Artificial Sequence: Synthetic polypeptide
  REGION 1..121: note = Synthetic Construct
  VARIANT 55: note = Glutamic acid or Glutamine
  VARIANT 100: note = Glutamic acid or Glutamine
  VARIANT 102: note = Any naturally occurring amino acid
QVQLQESGPGLVKPSETLSLTCTVSGFTFNTYSMNWIRQPPGKGLEWVAHIKTKXNNFATFYAPSLKSRVTISVDTSKNQFSLKLSSVTAADTAVYYCVXHXSNNYPFAYWGQGTLVTVSS

SEQ ID NO: 1320 - protein, 121 aa, synthetic construct
  REGION 1..121: note = Description of Artificial Sequence: Synthetic polypeptide
  REGION 1..121: note = Synthetic Construct
  VARIANT 55: note = Glutamic acid or Glutamine
  VARIANT 100: note = Glutamic acid or Glutamine
  VARIANT 102: note = Any naturally occurring amino acid
QVQLQESGPGLVKPSQTLSLTCTVSGFTFNTYSMNWIRQPPGKGLEWVAHIKTKXNNFATFYAPSLKSRVTISVDTSKNQFSLKLSSVTAADTAVYYCVXHXSNNYPFAYWGQGTLVTVSS

SEQ ID NO: 1321 - protein, 116 aa, synthetic construct
  REGION 1..116: note = Description of Artificial Sequence: Synthetic polypeptide
  REGION 1..116: note = Synthetic Construct
  VARIANT 91: note = Glutamic acid or Glutamine
QVQLQQSGAVLVKPGASVKLSCKASGYTFTTYWIHWVKQRPGRGPEWIGRNDPNSGGSNYNEKFRNKAILTVDKPSSTAYMQLNSLTSEDXAVYYCVRTNWDGDFWGQGTTLTVSS

SEQ ID NO: 1322 - protein, 116 aa, synthetic construct
  REGION 1..116: note = Description of Artificial Sequence: Synthetic polypeptide
  REGION 1..116: note = Synthetic Construct
QVQLVQSGAEVKKPGASVKVSCKASGYTFTTYWIHWVRQAPGQGLEWIGRNDPNSGGSNYNQKFQGRVTMTRDTSTSTVYMELSSLRSEDTAVYYCVRTNWDGDFWGQGTLVTVSS

SEQ ID NO: 1323 - protein, 116 aa, synthetic construct
  REGION 1..116: note = Description of Artificial Sequence: Synthetic polypeptide
  REGION 1..116: note = Synthetic Construct
EVQLVQSGAEVKKPGESLKISCKGSGYTFTTYWIHWVRQMPGKGLEWIGRNDPNSGGSNYNPSFQGQVTISADKSISTAYLQWSSLKASDTAMYYCVRTNWDGDFWGQGTLVTVSS

SEQ ID NO: 1324 - protein, 116 aa, synthetic construct
  REGION 1..116: note = Description of Artificial Sequence: Synthetic polypeptide
  REGION 1..116: note = Synthetic Construct
QVQLVQSGAEVKKPGSSVKVSCKASGYTFTTYWIHWVRQAPGQGLEWIGRNDPNSGGSNYNQKFQGRVTITADESTSTAYMELSSLRSEDTAVYYCVRTNWDGDFWGQGTLVTVSS

SEQ ID NO: 1325 - protein, 116 aa, synthetic construct
  REGION 1..116: note = Description of Artificial Sequence: Synthetic polypeptide
  REGION 1..116: note = Synthetic Construct
EVQLLESGGGLVQPGGSLRLSCAASGYTFTTYWIHWVRQAPGKGLEWIGRNDPNSGGSNYNDSVKGRFTISRDNSKNTLYLQMNSLRAEDTAVYYCVRTNWDGDFWGQGTLVTVSS

SEQ ID NO: 1326 - protein, 116 aa, synthetic construct
  REGION 1..116: note = Description of Artificial Sequence: Synthetic polypeptide
  REGION 1..116: note = Synthetic Construct
EVQLVESGGGLVQPGGSLRLSCAASGYTFTTYWIHWVRQAPGKGLEWIGRNDPNSGGSNYNDSVKGRFTISRDNAKNSLYLQMNSLRAEDTAVYYCVRTNWDGDFWGQGTLVTVSS

SEQ ID NO: 1327 - protein, 116 aa, synthetic construct
  REGION 1..116: note = Description of Artificial Sequence: Synthetic polypeptide
  REGION 1..116: note = Synthetic Construct
QVQLVESGGGVVQPGRSLRLSCAASGYTFTTYWIHWVRQAPGKGLEWIGRNDPNSGGSNYNDSVKGRFTISRDNSKNTLYLQMNSLRAEDTAVYYCVRTNWDGDFWGQGTLVTVSS

SEQ ID NO: 1328 - protein, 116 aa, synthetic construct
  REGION 1..116: note = Description of Artificial Sequence: Synthetic polypeptide
  REGION 1..116: note = Synthetic Construct
QVQLQESGPGLVKPSETLSLTCTVSGYTFTTYWIHWIRQPPGKGLEWIGRNDPNSGGSNYNPSLKSRVTISVDTSKNQFSLKLSSVTAADTAVYYCVRTNWDGDFWGQGTLVTVSS

SEQ ID NO: 1329 - protein, 116 aa, synthetic construct
  REGION 1..116: note = Description of Artificial Sequence: Synthetic polypeptide
  REGION 1..116: note = Synthetic Construct
EVQLVESGGGLVKPGGSLRLSCAASGYTFTTYWIHWVRQAPGKGLEWIGRNDPNSGGSNYNAPVKGRFTISRDDSKNTLYLQMNSLKTEDTAVYYCVRTNWDGDFWGQGTLVTVSS

SEQ ID NO: 1330 - protein, 116 aa, synthetic construct
  REGION 1..116: note = Description of Artificial Sequence: Synthetic polypeptide
  REGION 1..116: note = Synthetic Construct
QVQLQESGPGLVKPSQTLSLTCTVSGYTFTTYWIHWIRQPPGKGLEWIGRNDPNSGGSNYNPSLKSRVTISVDTSKNQFSLKLSSVTAADTAVYYCVRTNWDGDFWGQGTLVTVSS

SEQ ID NO: 1331 - protein, 126 aa, synthetic construct
  REGION 1..126: note = Description of Artificial Sequence: Synthetic polypeptide
  REGION 1..126: note = Synthetic Construct
EVQLQQSGAELVKPGASVKISCKASGYAFSNYWMSWVKQRPGKGLEWIGQIYPGDGDTKYNGKFEGKATLTADKSSSTAYMQLSSLTSEDSAVYFCSREKGADYYGSTYSAWFSYWGQGTLVTVSA

SEQ ID NO: 1332 - protein, 126 aa, synthetic construct
  REGION 1..126: note = Description of Artificial Sequence: Synthetic polypeptide
  REGION 1..126: note = Synthetic Construct
EVQLVQSGAEVKKPGESLKISCKGSGYAFSNYWMSWVRQMPGKGLEWIGQIYPGDGDTKYNPSFQGQVTISADKSISTAYLQWSSLKASDTAMYYCSREKGADYYGSTYSAWFSYWGQGTLVTVSS

SEQ ID NO: 1333 - protein, 126 aa, synthetic construct
  REGION 1..126: note = Description of Artificial Sequence: Synthetic polypeptide
  REGION 1..126: note = Synthetic Construct
QVQLVQSGAEVKKPGASVKVSCKASGYAFSNYWMSWVRQAPGQGLEWIGQIYPGDGDTKYNQKFQGRVTMTRDTSTSTVYMELSSLRSEDTAVYYCSREKGADYYGSTYSAWFSYWGQGTLVTVSS

SEQ ID NO: 1334 - protein, 126 aa, synthetic construct
  REGION 1..126: note = Description of Artificial Sequence: Synthetic polypeptide
  REGION 1..126: note = Synthetic Construct
EVQLLESGGGLVQPGGSLRLSCAASGYAFSNYWMSWVRQAPGKGLEWIGQIYPGDGDTKYNDSVKGRFTISRDNSKNTLYLQMNSLRAEDTAVYYCSREKGADYYGSTYSAWFSYWGQGTLVTVSS

SEQ ID NO: 1335 - protein, 126 aa, synthetic construct
  REGION 1..126: note = Description of Artificial Sequence: Synthetic polypeptide
  REGION 1..126: note = Synthetic Construct
QVQLVQSGAEVKKPGSSVKVSCKASGYAFSNYWMSWVRQAPGQGLEWIGQIYPGDGDTKYNQKFQGRVTITADESTSTAYMELSSLRSEDTAVYYCSREKGADYYGSTYSAWFSYWGQGTLVTVSS

SEQ ID NO: 1336 - protein, 126 aa, synthetic construct
  REGION 1..126: note = Description of Artificial Sequence: Synthetic polypeptide
  REGION 1..126: note = Synthetic Construct
EVQLVESGGGLVQPGGSLRLSCAASGYAFSNYWMSWVRQAPGKGLEWIGQIYPGDGDTKYNDSVKGRFTISRDNAKNSLYLQMNSLRAEDTAVYYCSREKGADYYGSTYSAWFSYWGQGTLVTVSS

SEQ ID NO: 1337 - protein, 126 aa, synthetic construct
  REGION 1..126: note = Description of Artificial Sequence: Synthetic polypeptide
  REGION 1..126: note = Synthetic Construct
QVQLVESGGGVVQPGRSLRLSCAASGYAFSNYWMSWVRQAPGKGLEWIGQIYPGDGDTKYNDSVKGRFTISRDNSKNTLYLQMNSLRAEDTAVYYCSREKGADYYGSTYSAWFSYWGQGTLVTVSS

SEQ ID NO: 1338 - protein, 126 aa, synthetic construct
  REGION 1..126: note = Description of Artificial Sequence: Synthetic polypeptide
  REGION 1..126: note = Synthetic Construct
QVQLQESGPGLVKPSETLSLTCTVSGYAFSNYWMSWIRQPPGKGLEWIGQIYPGDGDTKYNPSLKSRVTISVDTSKNQFSLKLSSVTAADTAVYYCSREKGADYYGSTYSAWFSYWGQGTLVTVSS

SEQ ID NO: 1339 - protein, 126 aa, synthetic construct
  REGION 1..126: note = Description of Artificial Sequence: Synthetic polypeptide
  REGION 1..126: note = Synthetic Construct
EVQLVESGGGLVKPGGSLRLSCAASGYAFSNYWMSWVRQAPGKGLEWIGQIYPGDGDTKYNAPVKGRFTISRDDSKNTLYLQMNSLKTEDTAVYYCSREKGADYYGSTYSAWFSYWGQGTLVTVSS

SEQ ID NO: 1340 - protein, 126 aa, synthetic construct
  REGION 1..126: note = Description of Artificial Sequence: Synthetic polypeptide
  REGION 1..126: note = Synthetic Construct
QVQLQESGPGLVKPSQTLSLTCTVSGYAFSNYWMSWIRQPPGKGLEWIGQIYPGDGDTKYNPSLKSRVTISVDTSKNQFSLKLSSVTAADTAVYYCSREKGADYYGSTYSAWFSYWGQGTLVTVSS

SEQ ID NO: 1341 - protein, 123 aa, synthetic construct
  REGION 1..123: note = Description of Artificial Sequence: Synthetic polypeptide
  REGION 1..123: note = Synthetic Construct
QVQLQQSGPELVKPGASLKISCKASGYAFSSSWMNWVKQRPGKGLEWIGRIYPGDGDTNYNGEFRVRATLTADTSSTTAYMQLSSLTSEDSAVYFCARLLRNQPGESYAMDYWGQGASVTVSS

SEQ ID NO: 1342 - protein, 123 aa, synthetic construct
  REGION 1..123: note = Description of Artificial Sequence: Synthetic polypeptide
  REGION 1..123: note = Synthetic Construct
EVQLVQSGAEVKKPGESLKISCKGSGYAFSSSWMNWVRQMPGKGLEWIGRIYPGDGDTNYNPSFQGQVTISADKSISTAYLQWSSLKASDTAMYYCARLLRNQPGESYAMDYWGQGTLVTVSS

SEQ ID NO: 1343 - protein, 123 aa, synthetic construct
  REGION 1..123: note = Description of Artificial Sequence: Synthetic polypeptide
  REGION 1..123: note = Synthetic Construct
QVQLVQSGAEVKKPGASVKVSCKASGYAFSSSWMNWVRQAPGQGLEWIGRIYPGDGDTNYNQKFQGRVTMTRDTSTSTVYMELSSLRSEDTAVYYCARLLRNQPGESYAMDYWGQGTLVTVSS

SEQ ID NO: 1344 - protein, 123 aa, synthetic construct
  REGION 1..123: note = Description of Artificial Sequence: Synthetic polypeptide
  REGION 1..123: note = Synthetic Construct
QVQLVQSGAEVKKPGSSVKVSCKASGYAFSSSWMNWVRQAPGQGLEWIGRIYPGDGDTNYNQKFQGRVTITADESTSTAYMELSSLRSEDTAVYYCARLLRNQPGESYAMDYWGQGTLVTVSS

SEQ ID NO: 1345 - protein, 123 aa, synthetic construct
  REGION 1..123: note = Description of Artificial Sequence: Synthetic polypeptide
  REGION 1..123: note = Synthetic Construct
EVQLLESGGGLVQPGGSLRLSCAASGYAFSSSWMNWVRQAPGKGLEWIGRIYPGDGDTNYNDSVKGRFTISRDNSKNTLYLQMNSLRAEDTAVYYCARLLRNQPGESYAMDYWGQGTLVTVSS

SEQ ID NO: 1346 - protein, 123 aa, synthetic construct
  REGION 1..123: note = Description of Artificial Sequence: Synthetic polypeptide
  REGION 1..123: note = Synthetic Construct
EVQLVESGGGLVQPGGSLRLSCAASGYAFSSSWMNWVRQAPGKGLEWIGRIYPGDGDTNYNDSVKGRFTISRDNAKNSLYLQMNSLRAEDTAVYYCARLLRNQPGESYAMDYWGQGTLVTVSS

SEQ ID NO: 1347 - protein, 123 aa, synthetic construct
  REGION 1..123: note = Description of Artificial Sequence: Synthetic polypeptide
  REGION 1..123: note = Synthetic Construct
QVQLVESGGGVVQPGRSLRLSCAASGYAFSSSWMNWVRQAPGKGLEWIGRIYPGDGDTNYNDSVKGRFTISRDNSKNTLYLQMNSLRAEDTAVYYCARLLRNQPGESYAMDYWGQGTLVTVSS

SEQ ID NO: 1348 - protein, 123 aa, synthetic construct
  REGION 1..123: note = Description of Artificial Sequence: Synthetic polypeptide
  REGION 1..123: note = Synthetic Construct
QVQLQESGPGLVKPSETLSLTCTVSGYAFSSSWMNWIRQPPGKGLEWIGRIYPGDGDTNYNPSLKSRVTISVDTSKNQFSLKLSSVTAADTAVYYCARLLRNQPGESYAMDYWGQGTLVTVSS

SEQ ID NO: 1349 - protein, 123 aa, synthetic construct
  REGION 1..123: note = Description of Artificial Sequence: Synthetic polypeptide
  REGION 1..123: note = Synthetic Construct
EVQLVESGGGLVKPGGSLRLSCAASGYAFSSSWMNWVRQAPGKGLEWIGRIYPGDGDTNYNAPVKGRFTISRDDSKNTLYLQMNSLKTEDTAVYYCARLLRNQPGESYAMDYWGQGTLVTVSS

SEQ ID NO: 1350 - protein, 123 aa, synthetic construct
  REGION 1..123: note = Description of Artificial Sequence: Synthetic polypeptide
  REGION 1..123: note = Synthetic Construct
QVQLQESGPGLVKPSQTLSLTCTVSGYAFSSSWMNWIRQPPGKGLEWIGRIYPGDGDTNYNPSLKSRVTISVDTSKNQFSLKLSSVTAADTAVYYCARLLRNQPGESYAMDYWGQGTLVTVSS

SEQ ID NO: 1351 - protein, 116 aa, synthetic construct
  REGION 1..116: note = Description of Artificial Sequence: Synthetic polypeptide
  REGION 1..116: note = Synthetic Construct
QVQLQQSGAELVKPGASVKLSCKASGYIFTTYWIHWVKQRPGRGPEWIGRIDPNNGDTNYNEKFKTKATLTVDKPSSTADMQLSSLTSEDSAVYYCVMTGTDFDYWGQGTTLTVSS

SEQ ID NO: 1352 - protein, 116 aa, synthetic construct
  REGION 1..116: note = Description of Artificial Sequence: Synthetic polypeptide
  REGION 1..116: note = Synthetic Construct
EVQLVQSGAEVKKPGESLKISCKGSGYIFTTYWIHWVRQMPGKGLEWIGRIDPNNGDTNYNPSFQGQVTISADKSISTAYLQWSSLKASDTAMYYCVMTGTDFDYWGQGTLVTVSS

SEQ ID NO: 1353 - protein, 116 aa, synthetic construct
  REGION 1..116: note = Description of Artificial Sequence: Synthetic polypeptide
  REGION 1..116: note = Synthetic Construct
QVQLVQSGAEVKKPGASVKVSCKASGYIFTTYWIHWVRQAPGQGLEWIGRIDPNNGDTNYNQKFQGRVTMTRDTSTSTVYMELSSLRSEDTAVYYCVMTGTDFDYWGQGTLVTVSS

SEQ ID NO: 1354 - protein, 116 aa, synthetic construct
  REGION 1..116: note = Description of Artificial Sequence: Synthetic polypeptide
  REGION 1..116: note = Synthetic Construct
QVQLVQSGAEVKKPGSSVKVSCKASGYIFTTYWIHWVRQAPGQGLEWIGRIDPNNGDTNYNQKFQGRVTITADESTSTAYMELSSLRSEDTAVYYCVMTGTDFDYWGQGTLVTVSS

SEQ ID NO: 1355 - protein, 116 aa, synthetic construct
  REGION 1..116: note = Description of Artificial Sequence: Synthetic polypeptide
  REGION 1..116: note = Synthetic Construct
EVQLLESGGGLVQPGGSLRLSCAASGYIFTTYWIHWVRQAPGKGLEWIGRIDPNNGDTNYNDSVKGRFTISRDNSKNTLYLQMNSLRAEDTAVYYCVMTGTDFDYWGQGTLVTVSS

SEQ ID NO: 1356 - protein, 116 aa, synthetic construct
  REGION 1..116: note = Description of Artificial Sequence: Synthetic polypeptide
  REGION 1..116: note = Synthetic Construct
QVQLVESGGGVVQPGRSLRLSCAASGYIFTTYWIHWVRQAPGKGLEWIGRIDPNNGDTNYNDSVKGRFTISRDNSKNTLYLQMNSLRAEDTAVYYCVMTGTDFDYWGQGTLVTVSS

SEQ ID NO: 1357 - protein, 116 aa, synthetic construct
  REGION 1..116: note = Description of Artificial Sequence: Synthetic polypeptide
  REGION 1..116: note = Synthetic Construct
EVQLVESGGGLVQPGGSLRLSCAASGYIFTTYWIHWVRQAPGKGLEWIGRIDPNNGDTNYNDSVKGRFTISRDNAKNSLYLQMNSLRAEDTAVYYCVMTGTDFDYWGQGTLVTVSS

SEQ ID NO: 1358 - protein, 116 aa, synthetic construct
  REGION 1..116: note = Description of Artificial Sequence: Synthetic polypeptide
  REGION 1..116: note = Synthetic Construct
QVQLQESGPGLVKPSETLSLTCTVSGYIFTTYWIHWIRQPPGKGLEWIGRIDPNNGDTNYNPSLKSRVTISVDTSKNQFSLKLSSVTAADTAVYYCVMTGTDFDYWGQGTLVTVSS

SEQ ID NO: 1359 - protein, 116 aa, synthetic construct
  REGION 1..116: note = Description of Artificial Sequence: Synthetic polypeptide
  REGION 1..116: note = Synthetic Construct
EVQLVESGGGLVKPGGSLRLSCAASGYIFTTYWIHWVRQAPGKGLEWIGRIDPNNGDTNYNAPVKGRFTISRDDSKNTLYLQMNSLKTEDTAVYYCVMTGTDFDYWGQGTLVTVSS

SEQ ID NO: 1360 - protein, 116 aa, synthetic construct
  REGION 1..116: note = Description of Artificial Sequence: Synthetic polypeptide
  REGION 1..116: note = Synthetic Construct
QVQLQESGPGLVKPSQTLSLTCTVSGYIFTTYWIHWIRQPPGKGLEWIGRIDPNNGDTNYNPSLKSRVTISVDTSKNQFSLKLSSVTAADTAVYYCVMTGTDFDYWGQGTLVTVSS

SEQ ID NO: 1361 - protein, 120 aa, synthetic construct
  REGION 1..120: note = Description of Artificial Sequence: Synthetic polypeptide
  REGION 1..120: note = Synthetic Construct
QVQLQQSGAEVVKPGASVKMSCKTSGYPFSNFWITWVKQRPGQGLVWIGDIYPGSDNRNFNERFKTKATLTVDTSSSTAYMHLSSLTSEDSAVYFCAREAYYTNPGFAYWGQGTLVTVSA

SEQ ID NO: 1362 - protein, 120 aa, synthetic construct
  REGION 1..120: note = Description of Artificial Sequence: Synthetic polypeptide
  REGION 1..120: note = Synthetic Construct
EVQLVQSGAEVKKPGESLKISCKGSGYPFSNFWITWVRQMPGKGLEWIGDIYPGSDNRNFNPSFQGQVTISADKSISTAYLQWSSLKASDTAMYYCAREAYYTNPGFAYWGQGTLVTVSS

SEQ ID NO: 1363 - protein, 120 aa, synthetic construct
  REGION 1..120: note = Description of Artificial Sequence: Synthetic polypeptide
  REGION 1..120: note = Synthetic Construct
QVQLVQSGAEVKKPGSSVKVSCKASGYPFSNFWITWVRQAPGQGLEWIGDIYPGSDNRNFNQKFQGRVTITADESTSTAYMELSSLRSEDTAVYYCAREAYYTNPGFAYWGQGTLVTVSS

SEQ ID NO: 1364 - protein, 120 aa, synthetic construct
  REGION 1..120: note = Description of Artificial Sequence: Synthetic polypeptide
  REGION 1..120: note = Synthetic Construct
QVQLVQSGAEVKKPGASVKVSCKASGYPFSNFWITWVRQAPGQGLEWIGDIYPGSDNRNFNQKFQGRVTMTRDTSTSTVYMELSSLRSEDTAVYYCAREAYYTNPGFAYWGQGTLVTVSS

SEQ ID NO: 1365 - protein, 120 aa, synthetic construct
  REGION 1..120: note = Description of Artificial Sequence: Synthetic polypeptide
  REGION 1..120: note = Synthetic Construct
EVQLVESGGGLVQPGGSLRLSCAASGYPFSNFWITWVRQAPGKGLEWIGDIYPGSDNRNFNDSVKGRFTISRDNAKNSLYLQMNSLRAEDTAVYYCAREAYYTNPGFAYWGQGTLVTVSS

SEQ ID NO: 1366 - protein, 120 aa, synthetic construct
  REGION 1..120: note = Description of Artificial Sequence: Synthetic polypeptide
  REGION 1..120: note = Synthetic Construct
QVQLVESGGGVVQPGRSLRLSCAASGYPFSNFWITWVRQAPGKGLEWIGDIYPGSDNRNFNDSVKGRFTISRDNSKNTLYLQMNSLRAEDTAVYYCAREAYYTNPGFAYWGQGTLVTVSS

SEQ ID NO: 1367 - protein, 120 aa, synthetic construct
  REGION 1..120: note = Description of Artificial Sequence: Synthetic polypeptide
  REGION 1..120: note = Synthetic Construct
EVQLLESGGGLVQPGGSLRLSCAASGYPFSNFWITWVRQAPGKGLEWIGDIYPGSDNRNFNDSVKGRFTISRDNSKNTLYLQMNSLRAEDTAVYYCAREAYYTNPGFAYWGQGTLVTVSS

SEQ ID NO: 1368 - protein, 120 aa, synthetic construct
  REGION 1..120: note = Description of Artificial Sequence: Synthetic polypeptide
  REGION 1..120: note = Synthetic Construct
QVQLQESGPGLVKPSETLSLTCTVSGYPFSNFWITWIRQPPGKGLEWIGDIYPGSDNRNFNPSLKSRVTISVDTSKNQFSLKLSSVTAADTAVYYCAREAYYTNPGFAYWGQGTLVTVSS

SEQ ID NO: 1369 - protein, 120 aa, synthetic construct
  REGION 1..120: note = Description of Artificial Sequence: Synthetic polypeptide
  REGION 1..120: note = Synthetic Construct
EVQLVESGGGLVKPGGSLRLSCAASGYPFSNFWITWVRQAPGKGLEWIGDIYPGSDNRNFNAPVKGRFTISRDDSKNTLYLQMNSLKTEDTAVYYCAREAYYTNPGFAYWGQGTLVTVSS

SEQ ID NO: 1370 - protein, 120 aa, synthetic construct
  REGION 1..120: note = Description of Artificial Sequence: Synthetic polypeptide
  REGION 1..120: note = Synthetic Construct
QLQLQESGPGLVKPSETLSLTCTVSGYPFSNFWITWIRQPPGKGLEWIGDIYPGSDNRNFNPSLKSRVTISVDTSKNQFSLKLSSVTAADTAVYYCAREAYYTNPGFAYWGQGTLVTVSS

SEQ ID NO: 1371 - protein, 122 aa, synthetic construct
  REGION 1..122: note = Description of Artificial Sequence: Synthetic polypeptide
  REGION 1..122: note = Synthetic Construct
EVQLVESGGRLVQPKGSLKLSCAASGFNFNTYAMNWVRQAPGKGLEWVARIRSKSNNYATYYADSVKDRFTISRDDSESMLYLQMNNLKTEDTAMYYCVRHYSNYGWGFAYWGQGTLVTVSA

SEQ ID NO: 1372 - protein, 122 aa, synthetic construct
  REGION 1..122: note = Description of Artificial Sequence: Synthetic polypeptide
  REGION 1..122: note = Synthetic Construct
EVQLVESGGGLVKPGGSLRLSCAASGFNFNTYAMNWVRQAPGKGLEWVARIRSKSNNYATYYAAPVKGRFTISRDDSKNTLYLQMNSLKTEDTAVYYCVRHYSNYGWGFAYWGQGTLVTVSS

SEQ ID NO: 1373 - protein, 122 aa, synthetic construct
  REGION 1..122: note = Description of Artificial Sequence: Synthetic polypeptide
  REGION 1..122: note = Synthetic Construct
EVQLVESGGGLVQPGGSLRLSCAASGFNFNTYAMNWVRQAPGKGLEWVARIRSKSNNYATYYADSVKGRFTISRDNAKNSLYLQMNSLRAEDTAVYYCVRHYSNYGWGFAYWGQGTLVTVSS

SEQ ID NO: 1374 - protein, 122 aa, synthetic construct
  REGION 1..122: note = Description of Artificial Sequence: Synthetic polypeptide
  REGION 1..122: note = Synthetic Construct
EVQLLESGGGLVQPGGSLRLSCAASGFNFNTYAMNWVRQAPGKGLEWVARIRSKSNNYATYYADSVKGRFTISRDNSKNTLYLQMNSLRAEDTAVYYCVRHYSNYGWGFAYWGQGTLVTVSS

SEQ ID NO: 1375 - protein, 122 aa, synthetic construct
  REGION 1..122: note = Description of Artificial Sequence: Synthetic polypeptide
  REGION 1..122: note = Synthetic Construct
QVQLVESGGGVVQPGRSLRLSCAASGFNFNTYAMNWVRQAPGKGLEWVARIRSKSNNYATYYADSVKGRFTISRDNSKNTLYLQMNSLRAEDTAVYYCVRHYSNYGWGFAYWGQGTLVTVSS

SEQ ID NO: 1376 - protein, 122 aa, synthetic construct
  REGION 1..122: note = Description of Artificial Sequence: Synthetic polypeptide
  REGION 1..122: note = Synthetic Construct
QVQLVQSGAEVKKPGSSVKVSCKASGFNFNTYAMNWVRQAPGQGLEWVARIRSKSNNYATYYAQKFQGRVTITADESTSTAYMELSSLRSEDTAVYYCVRHYSNYGWGFAYWGQGTLVTVSS

SEQ ID NO: 1377 - protein, 122 aa, synthetic construct
  REGION 1..122: note = Description of Artificial Sequence: Synthetic polypeptide
  REGION 1..122: note = Synthetic Construct
QVQLVQSGAEVKKPGASVKVSCKASGFNFNTYAMNWVRQAPGQGLEWVARIRSKSNNYATYYAQKFQGRVTMTRDTSTSTVYMELSSLRSEDTAVYYCVRHYSNYGWGFAYWGQGTLVTVSS

SEQ ID NO: 1378 - protein, 122 aa, synthetic construct
  REGION 1..122: note = Description of Artificial Sequence: Synthetic polypeptide
  REGION 1..122: note = Synthetic Construct
EVQLVQSGAEVKKPGESLKISCKGSGFNFNTYAMNWVRQMPGKGLEWVARIRSKSNNYATYYAPSFQGQVTISADKSISTAYLQWSSLKASDTAMYYCVRHYSNYGWGFAYWGQGTLVTVSS

SEQ ID NO: 1379 - protein, 122 aa, synthetic construct
  REGION 1..122: note = Description of Artificial Sequence: Synthetic polypeptide
  REGION 1..122: note = Synthetic Construct
QVQLQESGPGLVKPSETLSLTCTVSGFNFNTYAMNWIRQPPGKGLEWVARIRSKSNNYATYYAPSLKSRVTISVDTSKNQFSLKLSSVTAADTAVYYCVRHYSNYGWGFAYWGQGTLVTVSS

SEQ ID NO: 1380 - protein, 122 aa, synthetic construct
  REGION 1..122: note = Description of Artificial Sequence: Synthetic polypeptide
  REGION 1..122: note = Synthetic Construct
QLQLQESGPGLVKPSETLSLTCTVSGFNFNTYAMNWIRQPPGKGLEWVARIRSKSNNYATYYAPSLKSRVTISVDTSKNQFSLKLSSVTAADTAVYYCVRHYSNYGWGFAYWGQGTLVTVSS

SEQ ID NO: 1381 - protein, 113 aa, synthetic construct
  REGION 1..113: note = Description of Artificial Sequence: Synthetic polypeptide
  REGION 1..113: note = Synthetic Construct
  VARIANT 95: note = Glutamic acid or Glutamine
QVQLQQYGPELVKPGASVKMSCKVSGYTFSDYYIHWMKQSHGKSLEWIGYIYPNNGDNGYNQEFKGKATLTVDKSSSTAYMELRSLTFEDSAVYXCARRGYYGGSYDYWGQGT

SEQ ID NO: 1382 - protein, 119 aa, synthetic construct
  REGION 1..119: note = Description of Artificial Sequence: Synthetic polypeptide
  REGION 1..119: note = Synthetic Construct
QVQLVQSGAEVKKPGASVKVSCKASGYTFSDYYIHWVRQAPGQGLEWIGYIYPNNGDNGYNQKFQGRVTMTRDTSTSTVYMELSSLRSEDTAVYYCARRGYYGGSYDYWGQGTLVTVSS

SEQ ID NO: 1383 - protein, 119 aa, synthetic construct
  REGION 1..119: note = Description of Artificial Sequence: Synthetic polypeptide
  REGION 1..119: note = Synthetic Construct
EVQLVQSGAEVKKPGESLKISCKGSGYTFSDYYIHWVRQMPGKGLEWIGYIYPNNGDNGYNPSFQGQVTISADKSISTAYLQWSSLKASDTAMYYCARRGYYGGSYDYWGQGTLVTVSS

SEQ ID NO: 1384 - protein, 119 aa, synthetic construct
  REGION 1..119: note = Description of Artificial Sequence: Synthetic polypeptide
  REGION 1..119: note = Synthetic Construct
QVQLVQSGAEVKKPGSSVKVSCKASGYTFSDYYIHWVRQAPGQGLEWIGYIYPNNGDNGYNQKFQGRVTITADESTSTAYMELSSLRSEDTAVYYCARRGYYGGSYDYWGQGTLVTVSS

SEQ ID NO: 1385 - protein, 119 aa, synthetic construct
  REGION 1..119: note = Description of Artificial Sequence: Synthetic polypeptide
  REGION 1..119: note = Synthetic Construct
EVQLVESGGGLVQPGGSLRLSCAASGYTFSDYYIHWVRQAPGKGLEWIGYIYPNNGDNGYNDSVKGRFTISRDNAKNSLYLQMNSLRAEDTAVYYCARRGYYGGSYDYWGQGTLVTVSS

SEQ ID NO: 1386 - protein, 119 aa, synthetic construct
  REGION 1..119: note = Description of Artificial Sequence: Synthetic polypeptide
  REGION 1..119: note = Synthetic Construct
QVQLVESGGGVVQPGRSLRLSCAASGYTFSDYYIHWVRQAPGKGLEWIGYIYPNNGDNGYNDSVKGRFTISRDNSKNTLYLQMNSLRAEDTAVYYCARRGYYGGSYDYWGQGTLVTVSS

SEQ ID NO: 1387 - protein, 119 aa, synthetic construct
  REGION 1..119: note = Description of Artificial Sequence: Synthetic polypeptide
  REGION 1..119: note = Synthetic Construct
EVQLLESGGGLVQPGGSLRLSCAASGYTFSDYYIHWVRQAPGKGLEWIGYIYPNNGDNGYNDSVKGRFTISRDNSKNTLYLQMNSLRAEDTAVYYCARRGYYGGSYDYWGQGTLVTVSS

SEQ ID NO: 1388 - protein, 119 aa, synthetic construct
  REGION 1..119: note = Description of Artificial Sequence: Synthetic polypeptide
  REGION 1..119: note = Synthetic Construct
QVQLQESGPGLVKPSETLSLTCTVSGYTFSDYYIHWIRQPPGKGLEWIGYIYPNNGDNGYNPSLKSRVTISVDTSKNQFSLKLSSVTAADTAVYYCARRGYYGGSYDYWGQGTLVTVSS

SEQ ID NO: 1389 - protein, 119 aa, synthetic construct
  REGION 1..119: note = Description of Artificial Sequence: Synthetic polypeptide
  REGION 1..119: note = Synthetic Construct
EVQLVESGGGLVKPGGSLRLSCAASGYTFSDYYIHWVRQAPGKGLEWIGYIYPNNGDNGYNAPVKGRFTISRDDSKNTLYLQMNSLKTEDTAVYYCARRGYYGGSYDYWGQGTLVTVSS

SEQ ID NO: 1390 - protein, 119 aa, synthetic construct
  REGION 1..119: note = Description of Artificial Sequence: Synthetic polypeptide
  REGION 1..119: note = Synthetic Construct
QVQLQESGPGLVKPSQTLSLTCTVSGYTFSDYYIHWIRQPPGKGLEWIGYIYPNNGDNGYNPSLKSRVTISVDTSKNQFSLKLSSVTAADTAVYYCARRGYYGGSYDYWGQGTLVTVSS

SEQ ID NO: 1391 - protein, 113 aa, synthetic construct
  REGION 1..113: note = Description of Artificial Sequence: Synthetic polypeptide
  REGION 1..113: note = Synthetic Construct
WRIGQGKGSLKLARAARGFRFNTYAMTRVRQGPGKGREWEGVIRRKSSNFATLYADSVKDRFRASRDDSESMLYVQMSNWKQEDTAMYYGVRHKSNKYPFVYWGQGTLVTVSA

SEQ ID NO: 1392 - protein, 121 aa, synthetic construct
  REGION 1..121: note = Description of Artificial Sequence: Synthetic polypeptide
  REGION 1..121: note = Synthetic Construct
EVQLVESGGGLVKPGGSLRLSCAASGFRFNTYAMTWVRQAPGKGLEWEGVIRRKSSNFATLYAAPVKGRFTISRDDSKNTLYLQMNSLKTEDTAVYYCVRHKSNKYPFVYWGQGTLVTVSS

SEQ ID NO: 1393 - protein, 121 aa, synthetic construct
  REGION 1..121: note = Description of Artificial Sequence: Synthetic polypeptide
  REGION 1..121: note = Synthetic Construct
EVQLLESGGGLVQPGGSLRLSCAASGFRFNTYAMTWVRQAPGKGLEWEGVIRRKSSNFATLYADSVKGRFTISRDNSKNTLYLQMNSLRAEDTAVYYCVRHKSNKYPFVYWGQGTLVTVSS

SEQ ID NO: 1394 - protein, 121 aa, synthetic construct
  REGION 1..121: note = Description of Artificial Sequence: Synthetic polypeptide
  REGION 1..121: note = Synthetic Construct
EVQLVESGGGLVQPGGSLRLSCAASGFRFNTYAMTWVRQAPGKGLEWEGVIRRKSSNFATLYADSVKGRFTISRDNAKNSLYLQMNSLRAEDTAVYYCVRHKSNKYPFVYWGQGTLVTVSS

SEQ ID NO: 1395 - protein, 121 aa, synthetic construct
  REGION 1..121: note = Description of Artificial Sequence: Synthetic polypeptide
  REGION 1..121: note = Synthetic Construct
QVQLVESGGGVVQPGRSLRLSCAASGFRFNTYAMTWVRQAPGKGLEWEGVIRRKSSNFATLYADSVKGRFTISRDNSKNTLYLQMNSLRAEDTAVYYCVRHKSNKYPFVYWGQGTLVTVSS

SEQ ID NO: 1396 - protein, 121 aa, synthetic construct
  REGION 1..121: note = Description of Artificial Sequence: Synthetic polypeptide
  REGION 1..121: note = Synthetic Construct
QVQLVQSGAEVKKPGSSVKVSCKASGFRFNTYAMTWVRQAPGQGLEWEGVIRRKSSNFATLYAQKFQGRVTITADESTSTAYMELSSLRSEDTAVYYCVRHKSNKYPFVYWGQGTLVTVSS

SEQ ID NO: 1397 - protein, 121 aa, synthetic construct
  REGION 1..121: note = Description of Artificial Sequence: Synthetic polypeptide
  REGION 1..121: note = Synthetic Construct
QVQLVQSGAEVKKPGASVKVSCKASGFRFNTYAMTWVRQAPGQGLEWEGVIRRKSSNFATLYAQKFQGRVTMTRDTSTSTVYMELSSLRSEDTAVYYCVRHKSNKYPFVYWGQGTLVTVSS

SEQ ID NO: 1398 - protein, 121 aa, synthetic construct
  REGION 1..121: note = Description of Artificial Sequence: Synthetic polypeptide
  REGION 1..121: note = Synthetic Construct
EVQLVQSGAEVKKPGESLKISCKGSGFRFNTYAMTWVRQMPGKGLEWEGVIRRKSSNFATLYAPSFQGQVTISADKSISTAYLQWSSLKASDTAMYYCVRHKSNKYPFVYWGQGTLVTVSS

SEQ ID NO: 1399 - protein, 121 aa, synthetic construct
  REGION 1..121: note = Description of Artificial Sequence: Synthetic polypeptide
  REGION 1..121: note = Synthetic Construct
QVQLQESGPGLVKPSETLSLTCTVSGFRFNTYAMTWIRQPPGKGLEWEGVIRRKSSNFATLYAPSLKSRVTISVDTSKNQFSLKLSSVTAADTAVYYCVRHKSNKYPFVYWGQGTLVTVSS

SEQ ID NO: 1400 - protein, 121 aa, synthetic construct
  REGION 1..121: note = Description of Artificial Sequence: Synthetic polypeptide
  REGION 1..121: note = Synthetic Construct
QLQLQESGPGLVKPSETLSLTCTVSGFRFNTYAMTWIRQPPGKGLEWEGVIRRKSSNFATLYAPSLKSRVTISVDTSKNQFSLKLSSVTAADTAVYYCVRHKSNKYPFVYWGQGTLVTVSS

SEQ ID NO: 1401 - protein, 17 aa, synthetic construct
  REGION 1..17: note = Description of Artificial Sequence: Synthetic peptide
  REGION 1..17: note = Synthetic Construct
KSSQSVFYSSNQKNYLA

SEQ ID NO: 1402 - protein, 8 aa, synthetic construct
  REGION 1..8: note = Description of Artificial Sequence: Synthetic peptide
  REGION 1..8: note = Synthetic Construct
HQYLSSLT

SEQ ID NO: 1403 - protein, 9 aa, synthetic construct
  REGION 1..9: note = Description of Artificial Sequence: Synthetic peptide
  REGION 1..9: note = Synthetic Construct
SQSTHVPPT

SEQ ID NO: 1404 - protein, 9 aa, synthetic construct
  REGION 1..9: note = Description of Artificial Sequence: Synthetic peptide
  REGION 1..9: note = Synthetic Construct
YSFTGYYMH

SEQ ID NO: 1405 - protein, 16 aa, synthetic construct
  REGION 1..16: note = Description of Artificial Sequence: Synthetic peptide
  REGION 1..16: note = Synthetic Construct
VAEIRNKINNHATYYA

SEQ ID NO: 1406 - protein, 14 aa, synthetic construct
  REGION 1..14: note = Description of Artificial Sequence: Synthetic peptide
  REGION 1..14: note = Synthetic Construct
IGGINPNNGGTSYK

SEQ ID NO: 1407 - protein, 14 aa, synthetic construct
  REGION 1..14: note = Description of Artificial Sequence: Synthetic peptide
  REGION 1..14: note = Synthetic Construct
IGRVNPNNGGTSYN

SEQ ID NO: 1408 - protein, 13 aa, synthetic construct
  REGION 1..13: note = Description of Artificial Sequence: Synthetic peptide
  REGION 1..13: note = Synthetic Construct
TSLYDGSYLRFAY

SEQ ID NO: 1409 - protein, 9 aa, synthetic construct
  REGION 1..9: note = Description of Artificial Sequence: Synthetic peptide
  REGION 1..9: note = Synthetic Construct
VLTGGYFDY

SEQ ID NO: 1410 - protein, 20 aa, synthetic construct
  REGION 1..20: note = Description of Artificial Sequence: Synthetic peptide
  REGION 1..20: note = Synthetic Construct
QTQSPSSLAVSAGEKVTLSC

SEQ ID NO: 1411 - protein, 40 aa, synthetic construct
  REGION 1..40: note = Description of Artificial Sequence: Synthetic polypeptide
  REGION 1..40: note = Synthetic Construct
QTQVFLSLLLWVSGTCGNIMLTQSPSSLAVSAGEKVTLSC

SEQ ID NO: 1412 - protein, 23 aa, synthetic construct
  REGION 1..23: note = Description of Artificial Sequence: Synthetic peptide
  REGION 1..23: note = Synthetic Construct
DIVMSQSPSSLAVSVGEKVTMSC

SEQ ID NO: 1413 - protein, 15 aa, synthetic construct
  REGION 1..15: note = Description of Artificial Sequence: Synthetic peptide
  REGION 1..15: note = Synthetic Construct
WYQQKPGQSPKLLIS

SEQ ID NO: 1414 - protein, 32 aa, synthetic construct
  REGION 1..32: note = Description of Artificial Sequence: Synthetic polypeptide
  REGION 1..32: note = Synthetic Construct
GVPDRFTGSGFGTDFTLTISSVQGEDLAVYYC

SEQ ID NO: 1415 - protein, 32 aa, synthetic construct
  REGION 1..32: note = Description of Artificial Sequence: Synthetic polypeptide
  REGION 1..32: note = Synthetic Construct
GVPDRFTGSGSGTDFTLTINSVQAEDLAVYYC

SEQ ID NO: 1416 - protein, 30 aa, synthetic construct
  REGION 1..30: note = Description of Artificial Sequence: Synthetic polypeptide
  REGION 1..30: note = Synthetic Construct
GVQSEVKFEESGGGLVQPGGSMKLSCTASG

SEQ ID NO: 1417 - protein, 26 aa, synthetic construct
  REGION 1..26: note = Description of Artificial Sequence: Synthetic peptide
  REGION 1..26: note = Synthetic Construct
QVQLQQSGPELVKPGASVKISCKTSG

SEQ ID NO: 1418 - protein, 26 aa, synthetic construct
  REGION 1..26: note = Description of Artificial Sequence: Synthetic peptide
  REGION 1..26: note = Synthetic Construct
QVQLQQSGPDLVKPGASVKISCKASG

SEQ ID NO: 1419 - protein, 35 aa, synthetic construct
  REGION 1..35: note = Description of Artificial Sequence: Synthetic polypeptide
  REGION 1..35: note = Synthetic Construct
ESVKGRFTISRDDSKSSVSLQMNSLRTEDTGIYYC

SEQ ID NO: 1420 - protein, 35 aa, synthetic construct
  REGION 1..35: note = Description of Artificial Sequence: Synthetic polypeptide
  REGION 1..35: note = Synthetic Construct
QKFKGKATLTVDRSSSTAYMELRSLTSEDSAVYYC

SEQ ID NO: 1421 - protein, 35 aa, synthetic construct
  REGION 1..35: note = Description of Artificial Sequence: Synthetic polypeptide
  REGION 1..35: note = Synthetic Construct
QKFKGKAILTVDKSSSTAYMELRSLTSEDSAVYYC

SEQ ID NO: 1422 - protein, 129 aa, synthetic construct
  REGION 1..129: note = Description of Artificial Sequence: Synthetic polypeptide
  REGION 1..129: note = Synthetic Construct
QTQVFLSLLLWVSGTCGNIMLTQSPSSLAVSAGEKVTLSCKSSQSVFYSSNQKNYLAWYQQKPGQSPKLLISWASTRESGVPDRFTGSGSGTDFTLTINSVQAEDLAVYYCHQYLSSLTFGAGTKLELK

SEQ ID NO: 1423 - protein, 112 aa, synthetic construct
  REGION 1..112: note = Description of Artificial Sequence: Synthetic polypeptide
  REGION 1..112: note = Synthetic Construct
DIVMTQSPDSLAVSLGERATINCKSSQSVFYSSNQKNYLAWYQQKPGQPPKLLIYWASTRESGVPDRFSGSGSGTDFTLTISSLQAEDVAVYYCHQYLSSLTFGQGTKVEIK

SEQ ID NO: 1424 - protein, 112 aa, synthetic construct
  REGION 1..112: note = Description of Artificial Sequence: Synthetic polypeptide
  REGION 1..112: note = Synthetic Construct
DVVMTQSPLSLPVTLGQPASISCKSSQSVFYSSNQKNYLAWFQQRPGQSPRRLIYWASTRESGVPDRFSGSGSGTDFTLKISRVEAEDVGVYYCHQYLSSLTFGQGTKVEIK

SEQ ID NO: 1425 - protein, 112 aa, synthetic construct
  REGION 1..112: note = Description of Artificial Sequence: Synthetic polypeptide
  REGION 1..112: note = Synthetic Construct
DIVMTQSPLSLPVTPGEPASISCKSSQSVFYSSNQKNYLAWYLQKPGQSPQLLIYWASTRESGVPDRFSGSGSGTDFTLKISRVEAEDVGVYYCHQYLSSLTFGQGTKVEIK

SEQ ID NO: 1426 - protein, 112 aa, synthetic construct
  REGION 1..112: note = Description of Artificial Sequence: Synthetic polypeptide
  REGION 1..112: note = Synthetic Construct
DIQMTQSPSTLSASVGDRVTITCKSSQSVFYSSNQKNYLAWYQQKPGKAPKLLIYWASTRESGVPSRFSGSGSGTEFTLTISSLQPDDFATYYCHQYLSSLTFGQGTKVEIK

SEQ ID NO: 1427 - protein, 112 aa, synthetic construct
  REGION 1..112: note = Description of Artificial Sequence: Synthetic polypeptide
  REGION 1..112: note = Synthetic Construct
EIVMTQSPATLSVSPGERATLSCKSSQSVFYSSNQKNYLAWYQQKPGQAPRLLIYWASTRESGIPARFSGSGSGTEFTLTISSLQSEDFAVYYCHQYLSSLTFGQGTKVEIK

SEQ ID NO: 1428 - protein, 112 aa, synthetic construct
  REGION 1..112: note = Description of Artificial Sequence: Synthetic polypeptide
  REGION 1..112: note = Synthetic Construct
DIQLTQSPSFLSASVGDRVTITCKSSQSVFYSSNQKNYLAWYQQKPGKAPKLLIYWASTRESGVPSRFSGSGSGTEFTLTISSLQPEDFATYYCHQYLSSLTFGQGTKVEIK

SEQ ID NO: 1429 - protein, 112 aa, synthetic construct
  REGION 1..112: note = Description of Artificial Sequence: Synthetic polypeptide
  REGION 1..112: note = Synthetic Construct
EIVLTQSPATLSLSPGERATLSCKSSQSVFYSSNQKNYLAWYQQKPGQAPRLLIYWASTRESGIPARFSGSGSGTDFTLTISSLEPEDFAVYYCHQYLSSLTFGQGTKVEIK

SEQ ID NO: 1430 - protein, 112 aa, synthetic construct
  REGION 1..112: note = Description of Artificial Sequence: Synthetic polypeptide
  REGION 1..112: note = Synthetic Construct
DIQMTQSPSSLSASVGDRVTITCKSSQSVFYSSNQKNYLAWYQQKPGKAPKLLIYWASTRESGVPSRFSGSGSGTDFTLTISSLQPEDFATYYCHQYLSSLTFGQGTKVEIK

SEQ ID NO: 1431 - protein, 112 aa, synthetic construct
  REGION 1..112: note = Description of Artificial Sequence: Synthetic polypeptide
  REGION 1..112: note = Synthetic Construct
DIQMTQSPSSLSASVGDRVTITCKSSQSVFYSSNQKNYLAWYQQKPGKAPKLLIYWASTRESGVPSRFSGSGSGTDFTFTISSLQPEDIATYYCHQYLSSLTFGQGTKVEIK

SEQ ID NO: 1432 - protein, 112 aa, synthetic construct
  REGION 1..112: note = Description of Artificial Sequence: Synthetic polypeptide
  REGION 1..112: note = Synthetic Construct
EIVLTQSPGTLSLSPGERATLSCKSSQSVFYSSNQKNYLAWYQQKPGQAPRLLIYWASTRESGIPDRFSGSGSGTDFTLTISRLEPEDFAVYYCHQYLSSLTFGQGTKVEIK

SEQ ID NO: 1433 - protein, 113 aa, synthetic construct
  REGION 1..113: note = Description of Artificial Sequence: Synthetic polypeptide
  REGION 1..113: note = Synthetic Construct
DIVMSQSPSSLAVSVGEKVTMSCKSSQSLLYSSNQKNCLAWYQQKPGQSPKLLIYWASTRESGVPDRFTGSGSGTDFTLTISSVKAEDLAVYYCQQYYSYPLTFGAGTKLELK

SEQ ID NO: 1434 - protein, 113 aa, synthetic construct
  REGION 1..113: note = Description of Artificial Sequence: Synthetic polypeptide
  REGION 1..113: note = Synthetic Construct
DIVMTQSPDSLAVSLGERATINCKSSQSLLYSSNQKNCLAWYQQKPGQPPKLLIYWASTRESGVPDRFSGSGSGTDFTLTISSLQAEDVAVYYCQQYYSYPLTFGQGTKVEIK

SEQ ID NO: 1435 - protein, 113 aa, synthetic construct
  REGION 1..113: note = Description of Artificial Sequence: Synthetic polypeptide
  REGION 1..113: note = Synthetic Construct
DIVMTQSPLSLPVTPGEPASISCKSSQSLLYSSNQKNCLAWYLQKPGQSPQLLIYWASTRESGVPDRFSGSGSGTDFTLKISRVEAEDVGVYYCQQYYSYPLTFGQGTKVEIK

SEQ ID NO: 1436 - protein, 113 aa, synthetic construct
  REGION 1..113: note = Description of Artificial Sequence: Synthetic polypeptide
  REGION 1..113: note = Synthetic Construct
DVVMTQSPLSLPVTLGQPASISCKSSQSLLYSSNQKNCLAWFQQRPGQSPRRLIYWASTRESGVPDRFSGSGSGTDFTLKISRVEAEDVGVYYCQQYYSYPLTFGQGTKVEIK

SEQ ID NO: 1437 - protein, 113 aa, synthetic construct
  REGION 1..113: note = Description of Artificial Sequence: Synthetic polypeptide
  REGION 1..113: note = Synthetic Construct
DIQLTQSPSFLSASVGDRVTITCKSSQSLLYSSNQKNCLAWYQQKPGKAPKLLIYWASTRESGVPSRFSGSGSGTEFTLTISSLQPEDFATYYCQQYYSYPLTFGQGTKVEIK

SEQ ID NO: 1438 - protein, 113 aa, synthetic construct
  REGION 1..113: note = Description of Artificial Sequence: Synthetic polypeptide
  REGION 1..113: note = Synthetic Construct
EIVMTQSPATLSVSPGERATLSCKSSQSLLYSSNQKNCLAWYQQKPGQAPRLLIYWASTRESGIPARFSGSGSGTEFTLTISSLQSEDFAVYYCQQYYSYPLTFGQGTKVEIK

SEQ ID NO: 1439 - protein, 113 aa, synthetic construct
  REGION 1..113: note = Description of Artificial Sequence: Synthetic polypeptide
  REGION 1..113: note = Synthetic Construct
DIQMTQSPSTLSASVGDRVTITCKSSQSLLYSSNQKNCLAWYQQKPGKAPKLLIYWASTRESGVPSRFSGSGSGTEFTLTISSLQPDDFATYYCQQYYSYPLTFGQGTKVEIK

SEQ ID NO: 1440 - protein, 113 aa, synthetic construct
  REGION 1..113: note = Description of Artificial Sequence: Synthetic polypeptide
  REGION 1..113: note = Synthetic Construct
DIQMTQSPSSLSASVGDRVTITCKSSQSLLYSSNQKNCLAWYQQKPGKAPKLLIYWASTRESGVPSRFSGSGSGTDFTFTISSLQPEDIATYYCQQYYSYPLTFGQGTKVEIK

SEQ ID NO: 1441 - protein, 113 aa, synthetic construct
  REGION 1..113: note = Description of Artificial Sequence: Synthetic polypeptide
  REGION 1..113: note = Synthetic Construct
DIQMTQSPSSLSASVGDRVTITCKSSQSLLYSSNQKNCLAWYQQKPGKAPKLLIYWASTRESGVPSRFSGSGSGTDFTLTISSLQPEDFATYYCQQYYSYPLTFGQGTKVEIK

SEQ ID NO: 1442 - protein, 113 aa, synthetic construct
  REGION 1..113: note = Description of Artificial Sequence: Synthetic polypeptide
  REGION 1..113: note = Synthetic Construct
EIVLTQSPATLSLSPGERATLSCKSSQSLLYSSNQKNCLAWYQQKPGQAPRLLIYWASTRESGIPARFSGSGSGTDFTLTISSLEPEDFAVYYCQQYYSYPLTFGQGTKVEIK

SEQ ID NO: 1443 - protein, 113 aa, synthetic construct
  REGION 1..113: note = Description of Artificial Sequence: Synthetic polypeptide
  REGION 1..113: note = Synthetic Construct
EIVLTQSPGTLSLSPGERATLSCKSSQSLLYSSNQKNCLAWYQQKPGQAPRLLIYWASTRESGIPDRFSGSGSGTDFTLTISRLEPEDFAVYYCQQYYSYPLTFGQGTKVEIK

SEQ ID NO: 1444 - protein, 112 aa, synthetic construct
  REGION 1..112: note = Description of Artificial Sequence: Synthetic polypeptide
  REGION 1..112: note = Synthetic Construct
DVVMTQTPLSLPVSLGDQASISCRSSQSLVHSNGNTYLHWYLQKPGQSPKLLIYKVSNRFSGVPDRFSGSGSGTDFTLKISRVEAEDLGVYFCSQSTHVPPTFGSGTKLEIK

SEQ ID NO: 1445 - protein, 112 aa, synthetic construct
  REGION 1..112: note = Description of Artificial Sequence: Synthetic polypeptide
  REGION 1..112: note = Synthetic Construct
DVVMTQSPLSLPVTLGQPASISCRSSQSLVHSNGNTYLHWFQQRPGQSPRRLIYKVSNRFSGVPDRFSGSGSGTDFTLKISRVEAEDVGVYYCSQSTHVPPTFGQGTKVEIK

SEQ ID NO: 1446 - protein, 112 aa, synthetic construct
  REGION 1..112: note = Description of Artificial Sequence: Synthetic polypeptide
  REGION 1..112: note = Synthetic Construct
DIVMTQSPLSLPVTPGEPASISCRSSQSLVHSNGNTYLHWYLQKPGQSPQLLIYKVSNRFSGVPDRFSGSGSGTDFTLKISRVEAEDVGVYYCSQSTHVPPTFGQGTKVEIK

SEQ ID NO: 1447 - protein, 112 aa, synthetic construct
  REGION 1..112: note = Description of Artificial Sequence: Synthetic polypeptide
  REGION 1..112: note = Synthetic Construct
DIVMTQSPDSLAVSLGERATINCRSSQSLVHSNGNTYLHWYQQKPGQPPKLLIYKVSNRFSGVPDRFSGSGSGTDFTLTISSLQAEDVAVYYCSQSTHVPPTFGQGTKVEIK

SEQ ID NO: 1448 - protein, 112 aa, synthetic construct
  REGION 1..112: note = Description of Artificial Sequence: Synthetic polypeptide
  REGION 1..112: note = Synthetic Construct
EIVLTQSPATLSLSPGERATLSCRSSQSLVHSNGNTYLHWYQQKPGQAPRLLIYKVSNRFSGIPARFSGSGSGTDFTLTISSLEPEDFAVYYCSQSTHVPPTFGQGTKVEIK

SEQ ID NO: 1449 - protein, 112 aa, synthetic construct
  REGION 1..112: note = Description of Artificial Sequence: Synthetic polypeptide
  REGION 1..112: note = Synthetic Construct
DIQMTQSPSSLSASVGDRVTITCRSSQSLVHSNGNTYLHWYQQKPGKAPKLLIYKVSNRFSGVPSRFSGSGSGTDFTFTISSLQPEDIATYYCSQSTHVPPTFGQGTKVEIK

SEQ ID NO: 1450 - protein, 112 aa, synthetic construct
  REGION 1..112: note = Description of Artificial Sequence: Synthetic polypeptide
  REGION 1..112: note = Synthetic Construct
DIQMTQSPSTLSASVGDRVTITCRSSQSLVHSNGNTYLHWYQQKPGKAPKLLIYKVSNRFSGVPSRFSGSGSGTEFTLTISSLQPDDFATYYCSQSTHVPPTFGQGTKVEIK

SEQ ID NO: 1451 - protein, 112 aa, synthetic construct
  REGION 1..112: note = Description of Artificial Sequence: Synthetic polypeptide
  REGION 1..112: note = Synthetic Construct
DIQMTQSPSSLSASVGDRVTITCRSSQSLVHSNGNTYLHWYQQKPGKAPKLLIYKVSNRFSGVPSRFSGSGSGTDFTLTISSLQPEDFATYYCSQSTHVPPTFGQGTKVEIK

SEQ ID NO: 1452 - protein, 112 aa, synthetic construct
  REGION 1..112: note = Description of Artificial Sequence: Synthetic polypeptide
  REGION 1..112: note = Synthetic Construct
DIQLTQSPSFLSASVGDRVTITCRSSQSLVHSNGNTYLHWYQQKPGKAPKLLIYKVSNRFSGVPSRFSGSGSGTEFTLTISSLQPEDFATYYCSQSTHVPPTFGQGTKVEIK

SEQ ID NO: 1453 - protein, 112 aa, synthetic construct
  REGION 1..112: note = Description of Artificial Sequence: Synthetic polypeptide
  REGION 1..112: note = Synthetic Construct
EIVMTQSPATLSVSPGERATLSCRSSQSLVHSNGNTYLHWYQQKPGQAPRLLIYKVSNRFSGIPARFSGSGSGTEFTLTISSLQSEDFAVYYCSQSTHVPPTFGQGTKVEIK

SEQ ID NO: 1454 - protein, 112 aa, synthetic construct
  REGION 1..112: note = Description of Artificial Sequence: Synthetic polypeptide
  REGION 1..112: note = Synthetic Construct
EIVLTQSPGTLSLSPGERATLSCRSSQSLVHSNGNTYLHWYQQKPGQAPRLLIYKVSNRFSGIPDRFSGSGSGTDFTLTISRLEPEDFAVYYCSQSTHVPPTFGQGTKVEIK

SEQ ID NO: 1455 - protein, 117 aa, synthetic construct; identical to SEQ ID NO: 1175
  REGION 1..117: note = Description of Artificial Sequence: Synthetic polypeptide
  REGION 1..117: note = Synthetic Construct

SEQ ID NO: 1456 - protein, 121 aa, synthetic construct
  REGION 1..121: note = Description of Artificial Sequence: Synthetic polypeptide
  REGION 1..121: note = Synthetic Construct
EVQLVESGGGLVKPGGSLRLSCAASGFNFNTYAMKWVRQAPGKGLEWIARIRSNSNDYATNYSAPVKGRFTISRDDSKNTLYLQMNSLKTEDTAVYYCVGHKINNYPFAHWGQGTLVTVSS

SEQ ID NO: 1457 - protein, 121 aa, synthetic construct
  REGION 1..121: note = Description of Artificial Sequence: Synthetic polypeptide
  REGION 1..121: note = Synthetic Construct
EVQLLESGGGLVQPGGSLRLSCAASGFNFNTYAMKWVRQAPGKGLEWIARIRSNSNDYATNYSDSVKGRFTISRDNSKNTLYLQMNSLRAEDTAVYYCVGHKINNYPFAHWGQGTLVTVSS

SEQ ID NO: 1458 - protein, 121 aa, synthetic construct
  REGION 1..121: note = Description of Artificial Sequence: Synthetic polypeptide
  REGION 1..121: note = Synthetic Construct
QVQLVESGGGVVQPGRSLRLSCAASGFNFNTYAMKWVRQAPGKGLEWIARIRSNSNDYATNYSDSVKGRFTISRDNSKNTLYLQMNSLRAEDTAVYYCVGHKINNYPFAHWGQGTLVTVSS

SEQ ID NO: 1459 - protein, 121 aa, synthetic construct
  REGION 1..121: note = Description of Artificial Sequence: Synthetic polypeptide
  REGION 1..121: note = Synthetic Construct
EVQLVESGGGLVQPGGSLRLSCAASGFNFNTYAMKWVRQAPGKGLEWIARIRSNSNDYATNYSDSVKGRFTISRDNAKNSLYLQMNSLRAEDTAVYYCVGHKINNYPFAHWGQGTLVTVSS

SEQ ID NO: 1460 - protein, 121 aa, synthetic construct; identical to SEQ ID NO: 1459
  REGION 1..121: note = Description of Artificial Sequence: Synthetic polypeptide
  REGION 1..121: note = Synthetic Construct

SEQ ID NO: 1461 - protein, 121 aa, synthetic construct
  REGION 1..121: note = Description of Artificial Sequence: Synthetic polypeptide
  REGION 1..121: note = Synthetic Construct
QVQLVQSGAEVKKPGSSVKVSCKASGFNFNTYAMKWVRQAPGQGLEWIARIRSNSNDYATNYSQKFQGRVTITADESTSTAYMELSSLRSEDTAVYYCVGHKINNYPFAHWGQGTLVTVSS

SEQ ID NO: 1462 - protein, 121 aa, synthetic construct
  REGION 1..121: note = Description of Artificial Sequence: Synthetic polypeptide
  REGION 1..121: note = Synthetic Construct
QVQLVQSGAEVKKPGASVKVSCKASGFNFNTYAMKWVRQAPGQGLEWIARIRSNSNDYATNYSQKFQGRVTMTRDTSTSTVYMELSSLRSEDTAVYYCVGHKINNYPFAHWGQGTLVTVSS

SEQ ID NO: 1463 - protein, 121 aa, synthetic construct
  REGION 1..121: note = Description of Artificial Sequence: Synthetic polypeptide
  REGION 1..121: note = Synthetic Construct
EVQLVQSGAEVKKPGESLKISCKGSGFNFNTYAMKWVRQMPGKGLEWIARIRSNSNDYATNYSPSFQGQVTISADKSISTAYLQWSSLKASDTAMYYCVGHKINNYPFAHWGQGTLVTVSS

SEQ ID NO: 1464 - protein, 121 aa, synthetic construct
  REGION 1..121: note = Description of Artificial Sequence: Synthetic polypeptide
  REGION 1..121: note = Synthetic Construct
QVQLQESGPGLVKPSETLSLTCTVSGFNFNTYAMKWIRQPPGKGLEWIARIRSNSNDYATNYSPSLKSRVTISVDTSKNQFSLKLSSVTAADTAVYYCVGHKINNYPFAHWGQGTLVTVSS

SEQ ID NO: 1465 - protein, 121 aa, synthetic construct
  REGION 1..121: note = Description of Artificial Sequence: Synthetic polypeptide
  REGION 1..121: note = Synthetic Construct
QVQLQESGPGLVKPSQTLSLTCTVSGFNFNTYAMKWIRQPPGKGLEWIARIRSNSNDYATNYSPSLKSRVTISVDTSKNQFSLKLSSVTAADTAVYYCVGHKINNYPFAHWGQGTLVTVSS

SEQ ID NO: 1466 - protein, 126 aa, synthetic construct
  REGION 1..126: note = Description of Artificial Sequence: Synthetic polypeptide
  REGION 1..126: note = Synthetic Construct
GVQSEVKFEESGGGLVQPGGSMKLSCTASGFTFSDAWMDWVRQSPEKGLEWVAEIRNKINNHATYYAESVKGRFTISRDDSKSSVSLQMNSLRTEDTGIYYCTSLYDGSYLRFAYWGQGTLVTVSA

SEQ ID NO: 1467 - protein, 122 aa, synthetic construct
  REGION 1..122: note = Description of Artificial Sequence: Synthetic polypeptide
  REGION 1..122: note = Synthetic Construct
EVQLVESGGGLVKPGGSLRLSCAASGFTFSDAWMDWVRQAPGKGLEWVAEIRNKINNHATYYAAPVKGRFTISRDDSKNTLYLQMNSLKTEDTAVYYCTSLYDGSYLRFAYWGQGTLVTVSS

SEQ ID NO: 1468 - protein, 122 aa, synthetic construct
  REGION 1..122: note = Description of Artificial Sequence: Synthetic polypeptide
  REGION 1..122: note = Synthetic Construct
EVQLVESGGGLVQPGGSLRLSCAASGFTFSDAWMDWVRQAPGKGLEWVAEIRNKINNHATYYADSVKGRFTISRDNAKNSLYLQMNSLRAEDTAVYYCTSLYDGSYLRFAYWGQGTLVTVSS

SEQ ID NO: 1469 - protein, 122 aa, synthetic construct
  REGION 1..122: note = Description of Artificial Sequence: Synthetic polypeptide
  REGION 1..122: note = Synthetic Construct
EVQLLESGGGLVQPGGSLRLSCAASGFTFSDAWMDWVRQAPGKGLEWVAEIRNKINNHATYYADSVKGRFTISRDNSKNTLYLQMNSLRAEDTAVYYCTSLYDGSYLRFAYWGQGTLVTVSS

SEQ ID NO: 1470 - protein, 122 aa, synthetic construct
  REGION 1..122: note = Description of Artificial Sequence: Synthetic polypeptide
  REGION 1..122: note = Synthetic Construct
QVQLVESGGGVVQPGRSLRLSCAASGFTFSDAWMDWVRQAPGKGLEWVAEIRNKINNHATYYADSVKGRFTISRDNSKNTLYLQMNSLRAEDTAVYYCTSLYDGSYLRFAYWGQGTLVTVSS

SEQ ID NO: 1471 - protein, 122 aa, synthetic construct; identical to SEQ ID NO: 1468
  REGION 1..122: note = Description of Artificial Sequence: Synthetic polypeptide
  REGION 1..122: note = Synthetic Construct

SEQ ID NO: 1472 - protein, 122 aa, synthetic construct
  REGION 1..122: note = Description of Artificial Sequence: Synthetic polypeptide
  REGION 1..122: note = Synthetic Construct
QVQLVQSGAEVKKPGSSVKVSCKASGFTFSDAWMDWVRQAPGQGLEWVAEIRNKINNHATYYAQKFQGRVTITADESTSTAYMELSSLRSEDTAVYYCTSLYDGSYLRFAYWGQGTLVTVSS

SEQ ID NO: 1473 - protein, 122 aa, synthetic construct
  REGION 1..122: note = Description of Artificial Sequence: Synthetic polypeptide
  REGION 1..122: note = Synthetic Construct
QVQLVQSGAEVKKPGASVKVSCKASGFTFSDAWMDWVRQAPGQGLEWVAEIRNKINNHATYYAQKFQGRVTMTRDTSTSTVYMELSSLRSEDTAVYYCTSLYDGSYLRFAYWGQGTLVTVSS

SEQ ID NO: 1474 - protein, 122 aa, synthetic construct
  REGION 1..122: note = Description of Artificial Sequence: Synthetic polypeptide
  REGION 1..122: note = Synthetic Construct
EVQLVQSGAEVKKPGESLKISCKGSGFTFSDAWMDWVRQMPGKGLEWVAEIRNKINNHATYYAPSFQGQVTISADKSISTAYLQWSSLKASDTAMYYCTSLYDGSYLRFAYWGQGTLVTVSS

SEQ ID NO: 1475 - protein, 122 aa, synthetic construct
  REGION 1..122: note = Description of Artificial Sequence: Synthetic polypeptide
  REGION 1..122: note = Synthetic Construct
QVQLQESGPGLVKPSETLSLTCTVSGFTFSDAWMDWIRQPPGKGLEWVAEIRNKINNHATYYAPSLKSRVTISVDTSKNQFSLKLSSVTAADTAVYYCTSLYDGSYLRFAYWGQGTLVTVSS

SEQ ID NO: 1476 - protein, 122 aa, synthetic construct
  REGION 1..122: note = Description of Artificial Sequence: Synthetic polypeptide
  REGION 1..122: note = Synthetic Construct
QVQLQESGPGLVKPSQTLSLTCTVSGFTFSDAWMDWIRQPPGKGLEWVAEIRNKINNHATYYAPSLKSRVTISVDTSKNQFSLKLSSVTAADTAVYYCTSLYDGSYLRFAYWGQGTLVTVSS

SEQ ID NO: 1477 - protein, 119 aa, synthetic construct
  REGION 1..119: note = Description of Artificial Sequence: Synthetic polypeptide
  REGION 1..119: note = Synthetic Construct
QVQLQQSGPELVKPGASVKISCKTSGYTFTEYTMHWVKQSHGKSLEWIGGINPNNGGTSYKQKFKGKATLTVDRSSSTAYMELRSLTSEDSAVYYCARGGSHYYAMDYWGQGTSVTVSS

SEQ ID NO: 1478 - protein, 119 aa, synthetic construct
  REGION 1..119: note = Description of Artificial Sequence: Synthetic polypeptide
  REGION 1..119: note = Synthetic Construct
QVQLVQSGAEVKKPGASVKVSCKASGYTFTEYTMHWVRQAPGQGLEWIGGINPNNGGTSYKQKFQGRVTMTRDTSTSTVYMELSSLRSEDTAVYYCARGGSHYYAMDYWGQGTLVTVSS

SEQ ID NO: 1479 - protein, 119 aa, synthetic construct
  REGION 1..119: note = Description of Artificial Sequence: Synthetic polypeptide
  REGION 1..119: note = Synthetic Construct
QVQLVQSGAEVKKPGSSVKVSCKASGYTFTEYTMHWVRQAPGQGLEWIGGINPNNGGTSYKQKFQGRVTITADESTSTAYMELSSLRSEDTAVYYCARGGSHYYAMDYWGQGTLVTVSS

SEQ ID NO: 1480 - protein, 119 aa, synthetic construct
  REGION 1..119: note = Description of Artificial Sequence: Synthetic polypeptide
  REGION 1..119: note = Synthetic Construct
EVQLVQSGAEVKKPGESLKISCKGSGYTFTEYTMHWVRQMPGKGLEWIGGINPNNGGTSYKPSFQGQVTISADKSISTAYLQWSSLKASDTAMYYCARGGSHYYAMDYWGQGTLVTVSS

SEQ ID NO: 1481 - protein, 119 aa, synthetic construct
  REGION 1..119: note = Description of Artificial Sequence: Synthetic polypeptide
  REGION 1..119: note = Synthetic Construct
EVQLLESGGGLVQPGGSLRLSCAASGYTFTEYTMHWVRQAPGKGLEWIGGINPNNGGTSYKDSVKGRFTISRDNSKNTLYLQMNSLRAEDTAVYYCARGGSHYYAMDYWGQGTLVTVSS

SEQ ID NO: 1482 - protein, 119 aa, synthetic construct
  REGION 1..119: note = Description of Artificial Sequence: Synthetic polypeptide
  REGION 1..119: note = Synthetic Construct
QVQLVESGGGVVQPGRSLRLSCAASGYTFTEYTMHWVRQAPGKGLEWIGGINPNNGGTSYKDSVKGRFTISRDNSKNTLYLQMNSLRAEDTAVYYCARGGSHYYAMDYWGQGTLVTVSS

SEQ ID NO: 1483 - protein, 119 aa, synthetic construct
  REGION 1..119: note = Description of Artificial Sequence: Synthetic polypeptide
  REGION 1..119: note = Synthetic Construct
EVQLVESGGGLVQPGGSLRLSCAASGYTFTEYTMHWVRQAPGKGLEWIGGINPNNGGTSYKDSVKGRFTISRDNAKNSLYLQMNSLRAEDTAVYYCARGGSHYYAMDYWGQGTLVTVSS

SEQ ID NO: 1484 - protein, 119 aa, synthetic construct; identical to SEQ ID NO: 1483
  REGION 1..119: note = Description of Artificial Sequence: Synthetic polypeptide
  REGION 1..119: note = Synthetic Construct

SEQ ID NO: 1485 - protein, 119 aa, synthetic construct
  REGION 1..119: note = Description of Artificial Sequence: Synthetic polypeptide
  REGION 1..119: note = Synthetic Construct
QVQLQESGPGLVKPSETLSLTCTVSGYTFTEYTMHWIRQPPGKGLEWIGGINPNNGGTSYKPSLKSRVTISVDTSKNQFSLKLSSVTAADTAVYYCARGGSHYYAMDYWGQGTLVTVSS

SEQ ID NO: 1486 - protein, 119 aa, synthetic construct
  REGION 1..119: note = Description of Artificial Sequence: Synthetic polypeptide
  REGION 1..119: note = Synthetic Construct
EVQLVESGGGLVKPGGSLRLSCAASGYTFTEYTMHWVRQAPGKGLEWIGGINPNNGGTSYKAPVKGRFTISRDDSKNTLYLQMNSLKTEDTAVYYCARGGSHYYAMDYWGQGTLVTVSS

SEQ ID NO: 1487 - protein, 119 aa, synthetic construct
  REGION 1..119: note = Description of Artificial Sequence: Synthetic polypeptide
  REGION 1..119: note = Synthetic Construct
QLQLQESGPGLVKPSETLSLTCTVSGYTFTEYTMHWIRQPPGKGLEWIGGINPNNGGTSYKPSLKSRVTISVDTSKNQFSLKLSSVTAADTAVYYCARGGSHYYAMDYWGQGTLVTVSS

SEQ ID NO: 1488 - protein, 116 aa, synthetic construct
  REGION 1..116: note = Description of Artificial Sequence: Synthetic polypeptide
  REGION 1..116: note = Synthetic Construct
QVQLQQSGPDLVKPGASVKISCKASGYSFTGYYMHWVKQSHGKSLEWIGRVNPNNGGTSYNQKFKGKAILTVDKSSSTAYMELRSLTSEDSAVYYCVLTGGYFDYWGQGTTLTVSS

SEQ ID NO: 1489 - protein, 116 aa, synthetic construct
  REGION 1..116: note = Description of Artificial Sequence: Synthetic polypeptide
  REGION 1..116: note = Synthetic Construct
QVQLVQSGAEVKKPGASVKVSCKASGYSFTGYYMHWVRQAPGQGLEWIGRVNPNNGGTSYNQKFQGRVTMTRDTSTSTVYMELSSLRSEDTAVYYCVLTGGYFDYWGQGTLVTVSS

SEQ ID NO: 1490 - protein, 116 aa, synthetic construct
  REGION 1..116: note = Description of Artificial Sequence: Synthetic polypeptide
  REGION 1..116: note = Synthetic Construct
EVQLVQSGAEVKKPGESLKISCKGSGYSFTGYYMHWVRQMPGKGLEWIGRVNPNNGGTSYNPSFQGQVTISADKSISTAYLQWSSLKASDTAMYYCVLTGGYFDYWGQGTLVTVSS

SEQ ID NO: 1491 - protein, 116 aa, synthetic construct
  REGION 1..116: note = Description of Artificial Sequence: Synthetic polypeptide
  REGION 1..116: note = Synthetic Construct
EVQLLESGGGLVQPGGSLRLSCAASGYSFTGYYMHWVRQAPGKGLEWIGRVNPNNGGTSYNDSVKGRFTISRDNSKNTLYLQMNSLRAEDTAVYYCVLTGGYFDYWGQGTLVTVSS

SEQ ID NO: 1492 - protein, 116 aa, synthetic construct
  REGION 1..116: note = Description of Artificial Sequence: Synthetic polypeptide
  REGION 1..116: note = Synthetic Construct
QVQLVQSGAEVKKPGSSVKVSCKASGYSFTGYYMHWVRQAPGQGLEWIGRVNPNNGGTSYNQKFQGRVTITADESTSTAYMELSSLRSEDTAVYYCVLTGGYFDYWGQGTLVTVSS

SEQ ID NO: 1493 - protein, 116 aa, synthetic construct
  REGION 1..116: note = Description of Artificial Sequence: Synthetic polypeptide
  REGION 1..116: note = Synthetic Construct
QVQLVESGGGVVQPGRSLRLSCAASGYSFTGYYMHWVRQAPGKGLEWIGRVNPNNGGTSYNDSVKGRFTISRDNSKNTLYLQMNSLRAEDTAVYYCVLTGGYFDYWGQGTLVTVSS

SEQ ID NO: 1494 - protein, 116 aa, synthetic construct
  REGION 1..116: note = Description of Artificial Sequence: Synthetic polypeptide
  REGION 1..116: note = Synthetic Construct
EVQLVESGGGLVQPGGSLRLSCAASGYSFTGYYMHWVRQAPGKGLEWIGRVNPNNGGTSYNDSVKGRFTISRDNAKNSLYLQMNSLRAEDTAVYYCVLTGGYFDYWGQGTLVTVSS

SEQ ID NO: 1495 - protein, 116 aa, synthetic construct; identical to SEQ ID NO: 1494
  REGION 1..116: note = Description of Artificial Sequence: Synthetic polypeptide
  REGION 1..116: note = Synthetic Construct

SEQ ID NO: 1496 - protein, 116 aa, synthetic construct
  REGION 1..116: note = Description of Artificial Sequence: Synthetic polypeptide
  REGION 1..116: note = Synthetic Construct
QVQLQESGPGLVKPSETLSLTCTVSGYSFTGYYMHWIRQPPGKGLEWIGRVNPNNGGTSYNPSLKSRVTISVDTSKNQFSLKLSSVTAADTAVYYCVLTGGYFDYWGQGTLVTVSS

SEQ ID NO: 1497 - protein, 116 aa, synthetic construct
  REGION 1..116: note = Description of Artificial Sequence: Synthetic polypeptide
  REGION 1..116: note = Synthetic Construct
EVQLVESGGGLVKPGGSLRLSCAASGYSFTGYYMHWVRQAPGKGLEWIGRVNPNNGGTSYNAPVKGRFTISRDDSKNTLYLQMNSLKTEDTAVYYCVLTGGYFDYWGQGTLVTVSS

SEQ ID NO: 1498 - protein, 116 aa, synthetic construct
  REGION 1..116: note = Description of Artificial Sequence: Synthetic polypeptide
  REGION 1..116: note = Synthetic Construct
QLQLQESGPGLVKPSETLSLTCTVSGYSFTGYYMHWIRQPPGKGLEWIGRVNPNNGGTSYNPSLKSRVTISVDTSKNQFSLKLSSVTAADTAVYYCVLTGGYFDYWGQGTLVTVSS

SEQ ID NO: 1499 - protein, 109 aa, synthetic construct
  REGION 1..109: note = Description of Artificial Sequence: Synthetic polypeptide
  REGION 1..109: note = Synthetic Construct
QTQSPSSLAVSAGEKVTLSCKSSQSVFYSSNQKNYLAWYQQKPGQSPKLLISWASTRESGVPDRFTGSGFGTDFTLTISSVQGEDLAVYYCHQYLSSLTFGAGTKLELK

SEQ ID NO: 1500 - protein, 112 aa, synthetic construct; identical to SEQ ID NO: 1423
  REGION 1..112: note = Description of Artificial Sequence: Synthetic polypeptide
  REGION 1..112: note = Synthetic Construct

SEQ ID NO: 1501 - protein, 112 aa, synthetic construct; identical to SEQ ID NO: 1425
  REGION 1..112: note = Description of Artificial Sequence: Synthetic polypeptide
  REGION 1..112: note = Synthetic Construct

SEQ ID NO: 1502 - protein, 112 aa, synthetic construct; identical to SEQ ID NO: 1424
  REGION 1..112: note = Description of Artificial Sequence: Synthetic polypeptide
  REGION 1..112: note = Synthetic Construct

SEQ ID NO: 1503 - protein, 112 aa, synthetic construct; identical to SEQ ID NO: 1426
  REGION 1..112: note = Description of Artificial Sequence: Synthetic polypeptide
  REGION 1..112: note = Synthetic Construct

SEQ ID NO: 1504 - protein, 112 aa, synthetic construct; identical to SEQ ID NO: 1428
  REGION 1..112: note = Description of Artificial Sequence: Synthetic polypeptide
  REGION 1..112: note = Synthetic Construct

SEQ ID NO: 1505 - protein, 112 aa, synthetic construct; identical to SEQ ID NO: 1427
  REGION 1..112: note = Description of Artificial Sequence: Synthetic polypeptide
  REGION 1..112: note = Synthetic Construct

SEQ ID NO: 1506 - protein, 112 aa, synthetic construct; identical to SEQ ID NO: 1431
  REGION 1..112: note = Description of Artificial Sequence: Synthetic polypeptide
  REGION 1..112: note = Synthetic Construct

SEQ ID NO: 1507 - protein, 112 aa, synthetic construct; identical to SEQ ID NO: 1429
  REGION 1..112: note = Description of Artificial Sequence: Synthetic polypeptide
  REGION 1..112: note = Synthetic Construct

SEQ ID NO: 1508 - protein, 112 aa, synthetic construct; identical to SEQ ID NO: 1430
  REGION 1..112: note = Description of Artificial Sequence: Synthetic polypeptide
  REGION 1..112: note = Synthetic Construct

SEQ ID NO: 1509 - protein, 112 aa, synthetic construct; identical to SEQ ID NO: 1432
  REGION 1..112: note = Description of Artificial Sequence: Synthetic polypeptide
  REGION 1..112: note = Synthetic Construct

SEQ ID NO: 1510 - protein, 9 aa, synthetic construct
  REGION 1..9: note = Description of Artificial Sequence: Synthetic peptide
  REGION 1..9: note = Synthetic Construct
SQDVSTTVA

SEQ ID NO: 1511 - protein, 14 aa, synthetic construct
  REGION 1..14: note = Description of Artificial Sequence: Synthetic peptide
  REGION 1..14: note = Synthetic Construct
SQSIVHSNGNTYLE

SEQ ID NO: 1512 - protein, 9 aa, synthetic construct
  REGION 1..9: note = Description of Artificial Sequence: Synthetic peptide
  REGION 1..9: note = Synthetic Construct
SQGVSTAVA

SEQ ID NO: 1513 - protein, 9 aa, synthetic construct
  REGION 1..9: note = Description of Artificial Sequence: Synthetic peptide
  REGION 1..9: note = Synthetic Construct
SQDVRTAVA

SEQ ID NO: 1514 - protein, 9 aa, synthetic construct
  REGION 1..9: note = Description of Artificial Sequence: Synthetic peptide
  REGION 1..9: note = Synthetic Construct
SENVVTYVS

SEQ ID NO: 1515 - protein, 7 aa, synthetic construct
  REGION 1..7: note = Description of Artificial Sequence: Synthetic peptide
  REGION 1..7: note = Synthetic Construct
SASYRYT

SEQ ID NO: 1516 - protein, 7 aa, synthetic construct
  REGION 1..7: note = Description of Artificial Sequence: Synthetic peptide
  REGION 1..7: note = Synthetic Construct
WASTRHT

SEQ ID NO: 1517 - protein, 7 aa, synthetic construct
  REGION 1..7: note = Description of Artificial Sequence: Synthetic peptide
  REGION 1..7: note = Synthetic Construct
GASNRYT

SEQ ID NO: 1518 - protein, 9 aa, synthetic construct
  REGION 1..9: note = Description of Artificial Sequence: Synthetic peptide
  REGION 1..9: note = Synthetic Construct
QQHYSTPPT

SEQ ID NO: 1519 - protein, 9 aa, synthetic construct
  REGION 1..9: note = Description of Artificial Sequence: Synthetic peptide
  REGION 1..9: note = Synthetic Construct
FQGSHVPFT

SEQ ID NO: 1520 - protein, 8 aa, synthetic construct
  REGION 1..8: note = Description of Artificial Sequence: Synthetic peptide
  REGION 1..8: note = Synthetic Construct
HQHYSTYT

SEQ ID NO: 1521 - protein, 10 aa, synthetic construct
  REGION 1..10: note = Description of Artificial Sequence: Synthetic peptide
  REGION 1..10: note = Synthetic Construct
QQHYGTPPWT

SEQ ID NO: 1522 - protein, 9 aa, synthetic construct
  REGION 1..9: note = Description of Artificial Sequence: Synthetic peptide
  REGION 1..9: note = Synthetic Construct
GQGYSYPYT

SEQ ID NO: 1523 - protein, 11 aa, synthetic construct
  REGION 1..11: note = Description of Artificial Sequence: Synthetic peptide
  REGION 1..11: note = Synthetic Construct
SRFTFSSYAMS

SEQ ID NO: 1524 - protein, 11 aa, synthetic construct
  REGION 1..11: note = Description of Artificial Sequence: Synthetic peptide
  REGION 1..11: note = Synthetic Construct
SAFSLTNYAVH

SEQ ID NO: 1525 - protein, 11 aa, synthetic construct
  REGION 1..11: note = Description of Artificial Sequence: Synthetic peptide
  REGION 1..11: note = Synthetic Construct
SRFTFSSYAVS

SEQ ID NO: 1526 - protein, 14 aa, synthetic construct
  REGION 1..14: note = Description of Artificial Sequence: Synthetic peptide
  REGION 1..14: note = Synthetic Construct
VAAISGGGRYTYYP

SEQ ID NO: 1527 - protein, 13 aa, synthetic construct
  REGION 1..13: note = Description of Artificial Sequence: Synthetic peptide
  REGION 1..13: note = Synthetic Construct
LGVIWSGGSTAFN

SEQ ID NO: 1528 - protein, 14 aa, synthetic construct
  REGION 1..14: note = Description of Artificial Sequence: Synthetic peptide
  REGION 1..14: note = Synthetic Construct
VATISGGGRYTYYP

SEQ ID NO: 1529 - protein, 10 aa, synthetic construct
  REGION 1..10: note = Description of Artificial Sequence: Synthetic peptide
  REGION 1..10: note = Synthetic Construct
ARHYDGYLDY

SEQ ID NO: 1530 - protein, 13 aa, synthetic construct
  REGION 1..13: note = Description of Artificial Sequence: Synthetic peptide
  REGION 1..13: note = Synthetic Construct
ATHYYRSTYAFSY

SEQ ID NO: 1531 - protein, 25 aa, synthetic construct
  REGION 1..25: note = Description of Artificial Sequence: Synthetic peptide
  REGION 1..25: note = Synthetic Construct
DIVMTQSHKFMSTSVGDRVSITCKA

SEQ ID NO: 1532 - protein, 25 aa, synthetic construct
  REGION 1..25: note = Description of Artificial Sequence: Synthetic peptide
  REGION 1..25: note = Synthetic Construct
DVLMTQTPLSLPVSLGDQASISCRS

SEQ ID NO: 1533 - protein, 25 aa, synthetic construct
  REGION 1..25: note = Description of Artificial Sequence: Synthetic peptide
  REGION 1..25: note = Synthetic Construct
DIVMTQSHKFMSTSIGARVSITCKA

SEQ ID NO: 1534 - protein, 25 aa, synthetic construct
  REGION 1..25: note = Description of Artificial Sequence: Synthetic peptide
  REGION 1..25: note = Synthetic Construct
DIVMTQSPKSMSMSVGERVTLTCKA

SEQ ID NO: 1535 - protein, 32 aa, synthetic construct
  REGION 1..32: note = Description of Artificial Sequence: Synthetic polypeptide
  REGION 1..32: note = Synthetic Construct
GVPDRFTGSGFGTDFTFTISSVQAEDLAVYYC

SEQ ID NO: 1536 - protein, 32 aa, synthetic construct
  REGION 1..32: note = Description of Artificial Sequence: Synthetic polypeptide
  REGION 1..32: note = Synthetic Construct
GVPDRFTGSGSGTDYTLTISSVQAEDLALYYC

SEQ ID NO: 1537 - protein, 32 aa, synthetic construct
  REGION 1..32: note = Description of Artificial Sequence: Synthetic polypeptide
  REGION 1..32: note = Synthetic Construct
GVPDRFTGSGSATDFTLTISSVQAEDLADYHC

SEQ ID NO: 1538 - protein, 32 aa, synthetic construct
  REGION 1..32: note = Description of Artificial Sequence: Synthetic polypeptide
  REGION 1..32: note = Synthetic Construct
GVPDRFTGSGSGTDFTFTISSVQAEDLAVYYC

SEQ ID NO: 1539 - protein, 24 aa, synthetic construct
  REGION 1..24: note = Description of Artificial Sequence: Synthetic peptide
  REGION 1..24: note = Synthetic Construct
EVQLVESGGGLVKPGGSLKLSCEA

SEQ ID NO: 1540 - protein, 24 aa, synthetic construct
  REGION 1..24: note = Description of Artificial Sequence: Synthetic peptide
  REGION 1..24: note = Synthetic Construct
QVQLQESGPGLVQPSQSLSIICTV

SEQ ID NO: 1541 - protein, 12 aa, synthetic construct
  REGION 1..12: note = Description of Artificial Sequence: Synthetic peptide
  REGION 1..12: note = Synthetic Construct
WIRQSPGKGLEW

SEQ ID NO: 1542 - protein, 35 aa, synthetic construct
  REGION 1..35: note = Description of Artificial Sequence: Synthetic polypeptide
  REGION 1..35: note = Synthetic Construct
DSMKGRFTISRDNAKNFLYLQMSSLRSEDTAMYYC

SEQ ID NO: 1543 - protein, 35 aa, synthetic construct
  REGION 1..35: note = Description of Artificial Sequence: Synthetic polypeptide
  REGION 1..35: note = Synthetic Construct
AAFISRLNISKDNSKSQVFFKMNSLQSDDTAIYYC

SEQ ID NO: 1544 - protein, 107 aa, synthetic construct
  REGION 1..107: note = Description of Artificial Sequence: Synthetic polypeptide
  REGION 1..107: note = Synthetic Construct
DIVMTQSHKFMSTSVGDRVSITCKASQDVSTTVAWYQQKPGQSPKLLIYSASYRYTGVPDRFTGSGFGTDFTFTISSVQAEDLAVYYCQQHYSTPPTFGGGTKLEIK

SEQ ID NO: 1545 - protein, 112 aa, synthetic construct
  REGION 1..112: note = Description of Artificial Sequence: Synthetic polypeptide
  REGION 1..112: note = Synthetic Construct
DVLMTQTPLSLPVSLGDQASISCRSSQSIVHSNGNTYLEWYLQKPGQSPKLLIYKVSNRFSGVPDRFSGSGSGTDFTLKISRVEAEDLGVYYCFQGSHVPFTFGSGTKLEIK

SEQ ID NO: 1546 - protein, 106 aa, synthetic construct
  REGION 1..106: note = Description of Artificial Sequence: Synthetic polypeptide
  REGION 1..106: note = Synthetic Construct
DIVMTQSHKFMSTSVGDRVSITCKASQGVSTAVAWYQQKPGQSPKLLIYWASTRHTGVPDRFTGSGSGTDYTLTISSVQAEDLALYYCHQHYSTYTFGGGTKLEIK

SEQ ID NO: 1547 - protein, 108 aa, synthetic construct
  REGION 1..108: note = Description of Artificial Sequence: Synthetic polypeptide
  REGION 1..108: note = Synthetic Construct
DIVMTQSHKFMSTSIGARVSITCKASQDVRTAVAWYQQKPGQSPKLLIYSASYRYTGVPDRFTGSGFGTDFTFTISSVQAEDLAVYYCQQHYGTPPWTFGGGTKLEIK

SEQ ID NO: 1548 - protein, 107 aa, synthetic construct
  REGION 1..107: note = Description of Artificial Sequence: Synthetic polypeptide
  REGION 1..107: note = Synthetic Construct
DIVMTQSPKSMSMSVGERVTLTCKASENVVTYVSWYQQKPEQSPKLLIYGASNRYTGVPDRFTGSGSATDFTLTISSVQAEDLADYHCGQGYSYPYTFGGGTKLEIK

SEQ ID NO: 1549 - protein, 108 aa, synthetic construct
  REGION 1..108: note = Description of Artificial Sequence: Synthetic polypeptide
  REGION 1..108: note = Synthetic Construct
DIVMTQSHKFMSTSIGARVSITCKASQDVRTAVAWYQQKPGQSPKLLIYSASYRYTGVPDRFTGSGSGTDFTFTISSVQAEDLAVYYCQQHYGTPPWTFGGGTKLEIK

SEQ ID NO: 1550 - protein, 107 aa, synthetic construct
  REGION 1..107: note = Description of Artificial Sequence: Synthetic polypeptide
  REGION 1..107: note = Synthetic Construct
DIVMTQSHKFMSTSVGDRVSITCKASQDVSTTVAWYQQKPGQSPKLLIYSASYRYTGVPDRFTGSGSGTDFTFTISSVQAEDLAVYYCQQHYSTPPTFGGGTKLEIK

SEQ ID NO: 1551 - protein, 117 aa, synthetic construct
  REGION 1..117: note = Description of Artificial Sequence: Synthetic polypeptide
  REGION 1..117: note = Synthetic Construct
EVQLVESGGGLVKPGGSLKLSCEASRFTFSSYAMSWVRQTPEKRLEWVAAISGGGRYTYYPDSMKGRFTISRDNAKNFLYLQMSSLRSEDTAMYYCARHYDGYLDYWGQGTTLTVSS

SEQ ID NO: 1552 - protein, 119 aa, synthetic construct
  REGION 1..119: note = Description of Artificial Sequence: Synthetic polypeptide
  REGION 1..119: note = Synthetic Construct
QVQLQESGPGLVQPSQSLSIICTVSAFSLTNYAVHWIRQSPGKGLEWLGVIWSGGSTAFNAAFISRLNISKDNSKSQVFFKMNSLQSDDTAIYYCATHYYRSTYAFSYWGQGTLVTVSA

SEQ ID NO: 1553 - protein, 117 aa, synthetic construct
  REGION 1..117: note = Description of Artificial Sequence: Synthetic polypeptide
  REGION 1..117: note = Synthetic Construct
EVQLVESGGGLVKPGGSLKLSCEASRFTFSSYAVSWVRQTPEKRLEWVATISGGGRYTYYPDSMKGRFTISRDNAKNFLYLQMSSLRSEDTAMYYCARHYDGYLDYWGQGTTLTVSS

SEQ ID NO: 1554 - protein, 14 aa, synthetic construct
  REGION 1..14: note = Description of Artificial Sequence: Synthetic peptide
  REGION 1..14: note = Synthetic Construct
SQSLVHSNGNTYLH

SEQ ID NO: 1555 - protein, 14 aa, synthetic construct
  REGION 1..14: note = Description of Artificial Sequence: Synthetic peptide
  REGION 1..14: note = Synthetic Construct
SQSLVHSNGDTYLH

SEQ ID NO: 1556 - protein, 13 aa, synthetic construct
  REGION 1..13: note = Description of Artificial Sequence: Synthetic peptide
  REGION 1..13: note = Synthetic Construct
SESVDYHGTSLMQ

SEQ ID NO: 1557 - protein, 9 aa, synthetic construct
  REGION 1..9: note = Description of Artificial Sequence: Synthetic peptide
  REGION 1..9: note = Synthetic Construct
  VARIANT 5: note = Glutamic acid or Glutamine
SENIXYSLA

SEQ ID NO: 1558 - protein, 11 aa, synthetic construct
  REGION 1..11: note = Description of Artificial Sequence: Synthetic peptide
  REGION 1..11: note = Synthetic Construct
RASQSIGTSIH

SEQ ID NO: 1559 - protein, 7 aa, synthetic construct
  REGION 1..7: note = Description of Artificial Sequence: Synthetic peptide
  REGION 1..7: note = Synthetic Construct
KVSNRVS

SEQ ID NO: 1560 - protein, 7 aa, synthetic construct
  REGION 1..7: note = Description of Artificial Sequence: Synthetic peptide
  REGION 1..7: note = Synthetic Construct
KVSDRFS

SEQ ID NO: 1561 - protein, 7 aa, synthetic construct
  REGION 1..7: note = Description of Artificial Sequence: Synthetic peptide
  REGION 1..7: note = Synthetic Construct
AASNVES

SEQ ID NO: 1562 - protein, 7 aa, synthetic construct
  REGION 1..7: note = Description of Artificial Sequence: Synthetic peptide
  REGION 1..7: note = Synthetic Construct
NANSLED

SEQ ID NO: 1563 - protein, 7 aa, synthetic construct
  REGION 1..7: note = Description of Artificial Sequence: Synthetic peptide
  REGION 1..7: note = Synthetic Construct
FASESIS

SEQ ID NO: 1564 - protein, 9 aa, synthetic construct
  REGION 1..9: note = Description of Artificial Sequence: Synthetic peptide
  REGION 1..9: note = Synthetic Construct
QQNRKILWT

SEQ ID NO: 1565 - protein, 9 aa, synthetic construct
  REGION 1..9: note = Description of Artificial Sequence: Synthetic peptide
  REGION 1..9: note = Synthetic Construct
KQAYDVPWT

SEQ ID NO: 1566 - protein, 9 aa, synthetic construct
  REGION 1..9: note = Description of Artificial Sequence: Synthetic peptide
  REGION 1..9: note = Synthetic Construct
QQTNTWPIT

SEQ ID NO: 1567 - protein, 11 aa, synthetic construct
  REGION 1..11: note = Description of Artificial Sequence: Synthetic peptide
  REGION 1..11: note = Synthetic Construct
SGYTFTDFYMN

SEQ ID NO: 1568 - protein, 11 aa, synthetic construct
  REGION 1..11: note = Description of Artificial Sequence: Synthetic peptide
  REGION 1..11: note = Synthetic Construct
SGYTFTAYWMH

SEQ ID NO: 1569 - protein, 11 aa, synthetic construct
  REGION 1..11: note = Description of Artificial Sequence: Synthetic peptide
  REGION 1..11: note = Synthetic Construct
SGFNIKNTYIH

SEQ ID NO: 1570 - protein, 11 aa, synthetic construct
  REGION 1..11: note = Description of Artificial Sequence: Synthetic peptide
  REGION 1..11: note = Synthetic Construct
SGYTFTNYWIH

SEQ ID NO: 1571 - protein, 11 aa, synthetic construct
  REGION 1..11: note = Description of Artificial Sequence: Synthetic peptide
  REGION 1..11: note = Synthetic Construct
SGYTFTSATMH

SEQ ID NO: 1572 - protein, 9 aa, synthetic construct
  REGION 1..9: note = Description of Artificial Sequence: Synthetic peptide
  REGION 1..9: note = Synthetic Construct
YSFTDYNIH

SEQ ID NO: 1573 - protein, 9 aa, synthetic construct
  REGION 1..9: note = Description of Artificial Sequence: Synthetic peptide
  REGION 1..9: note = Synthetic Construct
FTLSNYWMN

SEQ ID NO: 1574 - protein, 9 aa, synthetic construct
  REGION 1..9: note = Description of Artificial Sequence: Synthetic peptide
  REGION 1..9: note = Synthetic Construct
YTFTDYNIH

SEQ ID NO: 1575 - protein, 14 aa, synthetic construct
  REGION 1..14: note = Description of Artificial Sequence: Synthetic peptide
  REGION 1..14: note = Synthetic Construct
IGDINPNNGHTTYN

SEQ ID NO: 1576 - protein, 14 aa, synthetic construct
  REGION 1..14: note = Description of Artificial Sequence: Synthetic peptide
  REGION 1..14: note = Synthetic Construct
IGRTHPSDSDTNYN

SEQ ID NO: 1577 - protein, 14 aa, synthetic construct
  REGION 1..14: note = Description of Artificial Sequence: Synthetic peptide
  REGION 1..14: note = Synthetic Construct
IGRIDPAIGNTNYA

SEQ ID NO: 1578 - protein, 14 aa, synthetic construct
  REGION 1..14: note = Description of Artificial Sequence: Synthetic peptide
  REGION 1..14: note = Synthetic Construct
IGRIHPSDSDINYN

SEQ ID NO: 1579 - protein, 14 aa, synthetic construct
  REGION 1..14: note = Description of Artificial Sequence: Synthetic peptide
  REGION 1..14: note = Synthetic Construct
IGYINPNSGYSKYN

SEQ ID NO: 1580 - protein, 14 aa, synthetic construct
  REGION 1..14: note = Description of Artificial Sequence: Synthetic peptide
  REGION 1..14: note = Synthetic Construct
IGYINPNSDNTRYI

SEQ ID NO: 1581 - protein, 16 aa, synthetic construct
  REGION 1..16: note = Description of Artificial Sequence: Synthetic peptide
  REGION 1..16: note = Synthetic Construct
VAQIRLKSDNYATHYA

SEQ ID NO: 1582 - protein, 14 aa, synthetic construct
  REGION 1..14: note = Description of Artificial Sequence: Synthetic peptide
  REGION 1..14: note = Synthetic Construct
IGYINPNNGGTTYN

SEQ ID NO: 1583 - protein, 16 aa, synthetic construct
  REGION 1..16: note = Description of Artificial Sequence: Synthetic peptide
  REGION 1..16: note = Synthetic Construct
AREPYSYGSSPWYFLV

SEQ ID NO: 1584 - protein, 13 aa, synthetic construct
  REGION 1..13: note = Description of Artificial Sequence: Synthetic peptide
  REGION 1..13: note = Synthetic Construct
ATYSNYVTGAMDS

SEQ ID NO: 1585 - protein, 7 aa, synthetic construct
  REGION 1..7: note = Description of Artificial Sequence: Synthetic peptide
  REGION 1..7: note = Synthetic Construct
VSPGMDY

SEQ ID NO: 1586 - protein, 9 aa, synthetic construct
  REGION 1..9: note = Description of Artificial Sequence: Synthetic peptide
  REGION 1..9: note = Synthetic Construct
VKTGTSFAS

SEQ ID NO: 1587 - protein, 16 aa, synthetic construct
  REGION 1..16: note = Description of Artificial Sequence: Synthetic peptide
  REGION 1..16: note = Synthetic Construct
ARWGIDGNYGGGFFDV

SEQ ID NO: 1588 - protein, 12 aa, synthetic construct
  REGION 1..12: note = Description of Artificial Sequence: Synthetic peptide
  REGION 1..12: note = Synthetic Construct
TRGFSNLGAMDY

SEQ ID NO: 1589 - protein, 10 aa, synthetic construct
  REGION 1..10: note = Description of Artificial Sequence: Synthetic peptide
  REGION 1..10: note = Synthetic Construct
TGAGGNHENY

SEQ ID NO: 1590 - protein, 9 aa, synthetic construct
  REGION 1..9: note = Description of Artificial Sequence: Synthetic peptide
  REGION 1..9: note = Synthetic Construct
ATTYVSFSY

SEQ ID NO: 1591 - protein, 25 aa, synthetic construct
  REGION 1..25: note = Description of Artificial Sequence: Synthetic peptide
  REGION 1..25: note = Synthetic Construct
  VARIANT 1: note = Glutamic acid or Glutamine
  VARIANT 4: note = Glutamic acid or Glutamine
XVVXTQTPLSLPVSLGDQASFSCRS

SEQ ID NO: 1592 - protein, 25 aa, synthetic construct
  REGION 1..25: note = Description of Artificial Sequence: Synthetic peptide
  REGION 1..25: note = Synthetic Construct
NIVMTQSPKSMSMSVGERVTLTCKA

SEQ ID NO: 1593 - protein, 25 aa, synthetic construct
  REGION 1..25: note = Description of Artificial Sequence: Synthetic peptide
  REGION 1..25: note = Synthetic Construct
DVVMTQTPLSLPVSLGDQASISCRS

SEQ ID NO: 1594 - protein, 25 aa, synthetic construct
  REGION 1..25: note = Description of Artificial Sequence: Synthetic peptide
  REGION 1..25: note = Synthetic Construct
DIVLTQSPASLAVSLGQRATISCRA

SEQ ID NO: 1595 - protein, 25 aa, synthetic construct
  REGION 1..25: note = Description of Artificial Sequence: Synthetic peptide
  REGION 1..25: note = Synthetic Construct
  VARIANT 14: note = Glutamic acid or Glutamine
DIQMTQFPASLAAXVGESVTITCRA

SEQ ID NO: 1596 - protein, 22 aa, synthetic construct
  REGION 1..22: note = Description of Artificial Sequence: Synthetic peptide
  REGION 1..22: note = Synthetic Construct
ILLTQSPAILSVSPGERVSFSC

SEQ ID NO: 1597 - protein, 15 aa, synthetic construct
  REGION 1..15: note = Description of Artificial Sequence: Synthetic peptide
  REGION 1..15: note = Synthetic Construct
WFLQKPGQSPKLLIF

SEQ ID NO: 1598 - protein, 15 aa, synthetic construct
  REGION 1..15: note = Description of Artificial Sequence: Synthetic peptide
  REGION 1..15: note = Synthetic Construct
WYQQKPGQPPKLLIY

SEQ ID NO: 1599 - protein, 15 aa, synthetic construct
  REGION 1..15: note = Description of Artificial Sequence: Synthetic peptide
  REGION 1..15: note = Synthetic Construct
WYQQKQGKSPQLLIY

SEQ ID NO: 1600 - protein, 15 aa, synthetic construct
  REGION 1..15: note = Description of Artificial Sequence: Synthetic peptide
  REGION 1..15: note = Synthetic Construct
WYQQRTNGSPRLLIK

SEQ ID NO: 1601 - protein, 32 aa, synthetic construct
  REGION 1..32: note = Description of Artificial Sequence: Synthetic polypeptide
  REGION 1..32: note = Synthetic Construct
GVPDRFSGSGSGTDFTLRISRVEAEDLGVYFC

SEQ ID NO: 1602 - protein, 32 aa, synthetic construct
  REGION 1..32: note = Description of Artificial Sequence: Synthetic polypeptide
  REGION 1..32: note = Synthetic Construct
GVPARFSGSGSGTDFSLNIHPVEEDDIAMYFC

SEQ ID NO: 1603 - protein, 32 aa, synthetic construct
  REGION 1..32: note = Description of Artificial Sequence: Synthetic polypeptide
  REGION 1..32: note = Synthetic Construct
GVPSRFSGSGSGTQYSMKINSMQPEDTAIYFC

SEQ ID NO: 1604 - protein, 32 aa, synthetic construct
  REGION 1..32: note = Description of Artificial Sequence: Synthetic polypeptide
  REGION 1..32: note = Synthetic Construct
GIPSRFSGSGSGTDFTLNINSVESEDIADYYC

SEQ ID NO: 1605 - protein, 24 aa, synthetic construct
  REGION 1..24: note = Description of Artificial Sequence: Synthetic peptide
  REGION 1..24: note = Synthetic Construct
  VARIANT 4: note = Glutamic acid or Glutamine
EVQXQQSGPELVKPGASVKISCKA

SEQ ID NO: 1606 - protein, 24 aa, synthetic construct
  REGION 1..24: note = Description of Artificial Sequence: Synthetic peptide
  REGION 1..24: note = Synthetic Construct
QVQLQQPGAELVKPGASVKVSCKA

SEQ ID NO: 1607 - protein, 24 aa, synthetic construct
  REGION 1..24: note = Description of Artificial Sequence: Synthetic peptide
  REGION 1..24: note = Synthetic Construct
QVQLQQSVAELVRPGASVKLSCTA

SEQ ID NO: 1608 - protein, 24 aa, synthetic construct
  REGION 1..24: note = Description of Artificial Sequence: Synthetic peptide
  REGION 1..24: note = Synthetic Construct
QVQLQQSGAELVKPGASVKVSCKA

SEQ ID NO: 1609 - protein, 24 aa, synthetic construct
  REGION 1..24: note = Description of Artificial Sequence: Synthetic peptide
  REGION 1..24: note = Synthetic Construct
  VARIANT 1..2: note = Any Amino Acid
  VARIANT 3..5: note = Any naturally occurring amino acid
XXXXXQSGTELARPGASVKMPCKA

SEQ ID NO: 1610 - protein, 26 aa, synthetic construct
  REGION 1..26: note = Description of Artificial Sequence: Synthetic peptide
  REGION 1..26: note = Synthetic Construct
QVQLQQSGRELVKPGASVKMSCMSSG

SEQ ID NO: 1611 - protein, 26 aa, synthetic construct
  REGION 1..26: note = Description of Artificial Sequence: Synthetic peptide
  REGION 1..26: note = Synthetic Construct
QVKLEESGGGLVQPGGSMKLSCVASG

SEQ ID NO: 1612 - protein, 26 aa, synthetic construct
  REGION 1..26: note = Description of Artificial Sequence: Synthetic peptide
  REGION 1..26: note = Synthetic Construct
QVQLQQSGPELVKPGASVQMSCEASG

SEQ ID NO: 1613 - protein, 12 aa, synthetic construct
  REGION 1..12: note = Description of Artificial Sequence: Synthetic peptide
  REGION 1..12: note = Synthetic Construct
WVKQSLGKSLEW

SEQ ID NO: 1614 - protein, 12 aa, synthetic construct
  REGION 1..12: note = Description of Artificial Sequence: Synthetic peptide
  REGION 1..12: note = Synthetic Construct
WVKEKPGQGLEW

SEQ ID NO: 1615 - protein, 12 aa, synthetic construct
  REGION 1..12: note = Description of Artificial Sequence: Synthetic peptide
  REGION 1..12: note = Synthetic Construct
WVKQRPEQGLEW

SEQ ID NO: 1616 - protein, 12 aa, synthetic construct
  REGION 1..12: note = Description of Artificial Sequence: Synthetic peptide
  REGION 1..12: note = Synthetic Construct
WVKQRPGQGLEW

SEQ ID NO: 1617 - protein, 12 aa, synthetic construct
  REGION 1..12: note = Description of Artificial Sequence: Synthetic peptide
  REGION 1..12: note = Synthetic Construct
WVIQSHGESLEW

SEQ ID NO: 1618 - protein, 35 aa, synthetic construct
  REGION 1..35: note = Description of Artificial Sequence: Synthetic polypeptide
  REGION 1..35: note = Synthetic Construct
  VARIANT 27: note = Glutamic acid or Glutamine
QKFKGKATLTVDKSSSTAYMELRSLTXEESAVYYC

SEQ ID NO: 1619 - protein, 35 aa, synthetic construct
  REGION 1..35: note = Description of Artificial Sequence: Synthetic polypeptide
  REGION 1..35: note = Synthetic Construct
HNFKGKATLTVDKSSSTAYMQLNSLTSEDSAVYYC

SEQ ID NO: 1620 - protein, 35 aa, synthetic construct
  REGION 1..35: note = Description of Artificial Sequence: Synthetic polypeptide
  REGION 1..35: note = Synthetic Construct
PKFQATATITVATSSNSAYLQLSSLASEDTAIYYC

SEQ ID NO: 1621 - protein, 36 aa, synthetic construct
  REGION 1..36: note = Description of Artificial Sequence: Synthetic polypeptide
  REGION 1..36: note = Synthetic Construct
QKFKGKATLTVDKSSSTAYMQILSSLTSEDSAVYYC

SEQ ID NO: 1622 - protein, 35 aa, synthetic construct
  REGION 1..35: note = Description of Artificial Sequence: Synthetic polypeptide
  REGION 1..35: note = Synthetic Construct
QKFKDKATLTADKSSSTAYMQLSSLTSEESAVYYC

SEQ ID NO: 1623 - protein, 35 aa, synthetic construct
  REGION 1..35: note = Description of Artificial Sequence: Synthetic polypeptide
  REGION 1..35: note = Synthetic Construct
QKFKGKATLTVNKSSSTAYMELRSLTSEDSAVYYC

SEQ ID NO: 1624 - protein, 35 aa, synthetic construct
  REGION 1..35: note = Description of Artificial Sequence: Synthetic polypeptide
  REGION 1..35: note = Synthetic Construct
ESVKGRFTISRDDSKSSVYLQMNNLRAVDTGIYYC

SEQ ID NO: 1625 - protein, 35 aa, synthetic construct
  REGION 1..35: note = Description of Artificial Sequence: Synthetic polypeptide
  REGION 1..35: note = Synthetic Construct
QKFKGKATLTVNKSSSTAYIELRSLTSEDSAVYHC

SEQ ID NO: 1626 - protein, 9 aa, synthetic construct
  REGION 1..9: note = Description of Artificial Sequence: Synthetic peptide
  REGION 1..9: note = Synthetic Construct
RGTGTTVTV

SEQ ID NO: 1627 - protein, 11 aa, synthetic construct
  REGION 1..11: note = Description of Artificial Sequence: Synthetic peptide
  REGION 1..11: note = Synthetic Construct
WGHGTSVTVSS

SEQ ID NO: 1628 - protein, 10 aa, synthetic construct
  REGION 1..10: note = Description of Artificial Sequence: Synthetic peptide
  REGION 1..10: note = Synthetic Construct
WSQGTLVTVS

SEQ ID NO: 1629 - protein, 112 aa, synthetic construct
  REGION 1..112: note = Description of Artificial Sequence: Synthetic polypeptide
  REGION 1..112: note = Synthetic Construct
  VARIANT 1: note = Glutamic acid or Glutamine
  VARIANT 4: note = Glutamic acid or Glutamine
XVVXTQTPLSLPVSLGDQASFSCRSSQSLVHSNGNTYLHWFLQKPGQSPKLLIFKVSNRVSGVPDRFSGSGSGTDFTLKISRVEAEDLGVYFCSQSTHVPLTFGAGTKLELK

SEQ ID NO: 1630 - protein, 107 aa, synthetic construct
  REGION 1..107: note = Description of Artificial Sequence: Synthetic polypeptide
  REGION 1..107: note = Synthetic Construct
NIVMTQSPKSMSMSVGERVTLTCKASENVVTYVSWYQQKPEQSPKLLIYGASNRYTGVPDRFTGSGSATDFTLTISSVQAEDLADYHCGQGYSYPYTFGGGTKLEIK

SEQ ID NO: 1631 - protein, 112 aa, synthetic construct
  REGION 1..112: note = Description of Artificial Sequence: Synthetic polypeptide
  REGION 1..112: note = Synthetic Construct
DVVMTQTPLSLPVSLGDQASISCRSSQSLVHSNGNTYLHWYLQKPGQSPKLLIYKVSDRFSGVPDRFSGSGSGTDFTLRISRVEAEDLGVYFCSQSTHVPLTFGAGTKLELK

SEQ ID NO: 1632 - protein, 112 aa, synthetic construct
  REGION 1..112: note = Description of Artificial Sequence: Synthetic polypeptide
  REGION 1..112: note = Synthetic Construct
DVVMTQTPLSLPVSLGDQASISCRSSQSLVHSNGDTYLHWYLQKPGQSPKLLIYKVSNRFSGVPDRFSGSGSGTDFTLKISRVEAEDLGVYFCSQSTHVPLTFGAGTKLELK

SEQ ID NO: 1633 - protein, 111 aa, synthetic construct
  REGION 1..111: note = Description of Artificial Sequence: Synthetic polypeptide
  REGION 1..111: note = Synthetic Construct
DIVLTQSPASLAVSLGQRATISCRASESVDYHGTSLMQWYQQKPGQPPKLLIYAASNVESGVPARFSGSGSGTDFSLNIHPVEEDDIAMYFCQQNRKILWTFGGGTKLEIK

SEQ ID NO: 1634 - protein, 107 aa, synthetic construct
  REGION 1..107: note = Description of Artificial Sequence: Synthetic polypeptide
  REGION 1..107: note = Synthetic Construct
  VARIANT 14: note = Glutamic acid or Glutamine
  VARIANT 30: note = Glutamic acid or Glutamine
DIQMTQFPASLAAXVGESVTITCRASENIXYSLAWYQQKQGKSPQLLIYNANSLEDGVPSRFSGSGSGTQYSMKINSMQPEDTAIYFCKQAYDVPWTFGGGTKLEIK

SEQ ID NO: 1635 - protein, 106 aa, synthetic construct
  REGION 1..106: note = Description of Artificial Sequence: Synthetic polypeptide
  REGION 1..106: note = Synthetic Construct
ILLTQSPAILSVSPGERVSFSCRASQSIGTSIHWYQQRTNGSPRLLIKFASESISGIPSRFSGSGSGTDFTLNINSVESEDIADYYCQQTNTWPITFGAGTKLELK

SEQ ID NO: 1636 - protein, 112 aa, synthetic construct
  REGION 1..112: note = Description of Artificial Sequence: Synthetic polypeptide
  REGION 1..112: note = Synthetic Construct
DVVMTQTPLSLPVSLGDQASISCRSSQSLVHSNGNTYLHWYLQKPGQSPKLLIYKVSNRFSGVPDRFSGSGSGTDFTLKISRVEAEDLGVYFCSQSTHVPLTFGAGTKLELK

SEQ ID NO: 1637 - protein, 121 aa, synthetic construct
  REGION 1..121: note = Description of Artificial Sequence: Synthetic polypeptide
  REGION 1..121: note = Synthetic Construct
  VARIANT 4: note = Glutamic acid or Glutamine
  VARIANT 88: note = Glutamic acid or Glutamine
EVQXQQSGPELVKPGASVKISCKASGYTFTDFYMNWVKQSLGKSLEWIGDINPNNGHTTYNQKFKGKATLTVDKSSSTAYMELRSLTXEESAVYYCAREPYSYGSSPWYFLVRGTGTTVTV

SEQ ID NO: 1638 - protein, 120 aa, synthetic construct
  REGION 1..120: note = Description of Artificial Sequence: Synthetic polypeptide
  REGION 1..120: note = Synthetic Construct
QVQLQQPGAELVKPGASVKVSCKASGYTFTAYWMHWVKEKPGQGLEWIGRTHPSDSDTNYNHNFKGKATLTVDKSSSTAYMQLNSLTSEDSAVYYCATYSNYVTGAMDSWGQGTSVTVSS

SEQ ID NO: 1639 - protein, 114 aa, synthetic construct
  REGION 1..114: note = Description of Artificial Sequence: Synthetic polypeptide
  REGION 1..114: note = Synthetic Construct
QVQLQQSVAELVRPGASVKLSCTASGFNIKNTYIHWVKQRPEQGLEWIGRIDPAIGNTNYAPKFQATATITVATSSNSAYLQLSSLASEDTAIYYCVSPGMDYWGHGTSVTVSS

SEQ ID NO: 1640 - protein, 116 aa, synthetic construct
  REGION 1..116: note = Description of Artificial Sequence: Synthetic polypeptide
  REGION 1..116: note = Synthetic Construct
QVQLQQSGAELVKPGASVKVSCKASGYTFTNYWIHWVKQRPGQGLEWIGRIHPSDSDINYNQKFKGKATLTVDKSSSTAYMQILSSLTSEDSAVYYCVKTGTSFASWSQGTLVTVS

SEQ ID NO: 1641 - protein, 105 aa, synthetic construct
  REGION 1..105: note = Description of Artificial Sequence: Synthetic polypeptide
  REGION 1..105: note = Synthetic Construct
EIVLTQSPATLSLSPGERATLSCKASSNVNYMSWYQQKPGQAPRLLIYFTSNLPSGIPARFSGSGSGTDFTLTISSLEPEDFAVYYCSGEVTQFTFGQGTKVEIK

SEQ ID NO: 1642 - protein, 123 aa, synthetic construct
  REGION 1..123: note = Description of Artificial Sequence: Synthetic polypeptide
  REGION 1..123: note = Synthetic Construct
  VARIANT 1..2: note = Any Amino Acid
  VARIANT 3..5: note = Any naturally occurring amino acid
XXXXXQSGTELARPGASVKMPCKASGYTFTSATMHWVKQRPGQGLEWIGYINPNSGYSKYNQKFKDKATLTADKSSSTAYMQLSSLTSEESAVYYCARWGIDGNYGGGFFDVWGTGTTVTVSS

SEQ ID NO: 1643 - protein, 119 aa, synthetic construct
  REGION 1..119: note = Description of Artificial Sequence: Synthetic polypeptide
  REGION 1..119: note = Synthetic Construct
QVQLQQSGRELVKPGASVKMSCMSSGYSFTDYNIHWVIQSHGESLEWIGYINPNSDNTRYIQKFKGKATLTVNKSSSTAYMELRSLTSEDSAVYYCTRGFSNLGAMDYWGQGTSVTVSS

SEQ ID NO: 1644 - protein, 119 aa, synthetic construct
  REGION 1..119: note = Description of Artificial Sequence: Synthetic polypeptide
  REGION 1..119: note = Synthetic Construct
QVKLEESGGGLVQPGGSMKLSCVASGFTLSNYWMNWVRQSPEKGLEWVAQIRLKSDNYATHYAESVKGRFTISRDDSKSSVYLQMNNLRAVDTGIYYCTGAGGNHENYWGQGTTLTVSS

SEQ ID NO: 1645 - protein, 116 aa, synthetic construct
  REGION 1..116: note = Description of Artificial Sequence: Synthetic polypeptide
  REGION 1..116: note = Synthetic Construct
QVQLQQSGPELVKPGASVQMSCEASGYTFTDYNIHWVKQSHGKSLEWIGYINPNNGGTTYNQKFKGKATLTVNKSSSTAYIELRSLTSEDSAVYHCATTYVSFSYWGQGTLVTVSA

SEQ ID NO: 1646 - protein, 11 aa, synthetic construct
  REGION 1..11: note = Description of Artificial Sequence: Synthetic peptide
  REGION 1..11: note = Synthetic Construct
  VARIANT 2: note = Any Amino Acid
  VARIANT 6: note = Any Amino Acid
  VARIANT 9: note = Any naturally occurring amino acid
RXSENXYSXLA

SEQ ID NO: 1647 - protein, 16 aa, synthetic construct
  REGION 1..16: note = Description of Artificial Sequence: Synthetic peptide
  REGION 1..16: note = Synthetic Construct
  VARIANT 5..6: note = Any Amino Acid
  VARIANT 7: note = Any naturally occurring amino acid
  VARIANT 12: note = Any naturally occurring amino acid
  VARIANT 16: note = Any naturally occurring amino acid
RSSQXXXHSNGXTYLX

SEQ ID NO: 1648 - protein, 17 aa, synthetic construct
  REGION 1..17: note = Description of Artificial Sequence: Synthetic peptide
  REGION 1..17: note = Synthetic Construct
  VARIANT 6..7: note = Any Amino Acid
  VARIANT 8: note = Any naturally occurring amino acid
  VARIANT 10..11: note = Any naturally occurring amino acid
  VARIANT 14..15: note = Any naturally occurring amino acid
  VARIANT 17: note = Any naturally occurring amino acid
KSSQSXXXSXXQKXXLX

SEQ ID NO: 1649 - skipped

SEQ ID NO: 1650 - protein, 9 aa, synthetic construct
  REGION 1..9: note = Description of Artificial Sequence: Synthetic peptide
  REGION 1..9: note = Synthetic Construct
  VARIANT 5: note = Any Amino Acid
  VARIANT 7: note = Any Amino Acid
  VARIANT 8: note = Any naturally occurring amino acid
YTFTXYXXH

SEQ ID NO: 1651 - protein, 9 aa, synthetic construct
  REGION 1..9: note = Description of Artificial Sequence: Synthetic peptide
  REGION 1..9: note = Synthetic Construct
  VARIANT 9: note = D or G
FTFSDAWMX

SEQ ID NO: 1652 - skipped

SEQ ID NO: 1653 - protein, 9 aa, synthetic construct
  REGION 1..9: note = Description of Artificial Sequence: Synthetic peptide
  REGION 1..9: note = Synthetic Construct
  VARIANT 2: note = Any Amino Acid
FXFNTYAMN

SEQ ID NO: 1654 - skipped

SEQ ID NO: 1655 - protein, 9 aa, synthetic construct
  REGION 1..9: note = Description of Artificial Sequence: Synthetic peptide
  REGION 1..9: note = Synthetic Construct
  VARIANT 2: note = Any Amino Acid
  VARIANT 6: note = Any Amino Acid
  VARIANT 9: note = Any naturally occurring amino acid
YXFSNXWIX

SEQ ID NO: 1656 - protein, 14 aa, synthetic construct
  REGION 1..14: note = Description of Artificial Sequence: Synthetic peptide
  REGION 1..14: note = Synthetic Construct
  VARIANT 3..4: note = Any Amino Acid
  VARIANT 5: note = Any naturally occurring amino acid
  VARIANT 7: note = N or E
  VARIANT 8: note = N, S, or T
  VARIANT 9: note = G or D
  VARIANT 10: note = G, D, or N
  VARIANT 11: note = T, S, or N
  VARIANT 12: note = Any Amino Acid
  VARIANT 14: note = N, S, K, or I
IGXXXPXXXXXXYX

SEQ ID NO: 1657 - protein, 14 aa, synthetic construct
  REGION 1..14: note = Description of Artificial Sequence: Synthetic peptide
  REGION 1..14: note = Synthetic Construct
  VARIANT 3..4: note = Any Amino Acid
  VARIANT 5: note = Any naturally occurring amino acid
  VARIANT 12: note = Any naturally occurring amino acid
IGXXXPNNGGTXYN

SEQ ID NO: 1658 - protein, 16 aa, synthetic construct
  REGION 1..16: note = Description of Artificial Sequence: Synthetic peptide
  REGION 1..16: note = Synthetic Construct
  VARIANT 6: note = N or D
  VARIANT 8: note = V or I
  VARIANT 9: note = N or K
VAEIRBKXXNHATYYA

SEQ ID NO: 1659 - protein, 16 aa, synthetic construct
  REGION 1..16: note = Description of Artificial Sequence: Synthetic peptide
  REGION 1..16: note = Synthetic Construct
  VARIANT 1: note = Any Amino Acid
  VARIANT 2: note = A or G
  VARIANT 3: note = Any Amino Acid
  VARIANT 5: note = R or K
  VARIANT 6: note = S, T, R, or L
  VARIANT 7: note = K or N
  VARIANT 8: note = S, E, or Q
  VARIANT 9: note = N, S, or D
  VARIANT 10: note = N or D
  VARIANT 11: note = Y or F
  VARIANT 14: note = Any Amino Acid
  VARIANT 16: note = A or S
XXXIXXXXXBXATXYX

SEQ ID NO: 1660 - protein, 16 aa, synthetic construct
  REGION 1..16: note = Description of Artificial Sequence: Synthetic peptide
  REGION 1..16: note = Synthetic Construct
  VARIANT 1: note = Any Amino Acid
  VARIANT 3: note = Any Amino Acid
  VARIANT 14: note = Any naturally occurring amino acid
XAXIRSKSNNYATXYA

SEQ ID NO: 1661 - protein, 14 aa, synthetic construct
  REGION 1..14: note = Description of Artificial Sequence: Synthetic peptide
  REGION 1..14: note = Synthetic Construct
  VARIANT 3: note = Any Amino Acid
  VARIANT 5: note = Y or D
  VARIANT 7: note = G or N
  VARIANT 8: note = Any Amino Acid
  VARIANT 9: note = G or D
  VARIANT 10: note = N or D
  VARIANT 11: note = T, R, or S
  VARIANT 12: note = N or K
  VARIANT 13: note = Y or F
IGXIXPXXXBXXXN

SEQ ID NO: 1662 - protein, 14 aa, synthetic construct
  REGION 1..14: note = Description of Artificial Sequence: Synthetic peptide
  REGION 1..14: note = Synthetic Construct
  VARIANT 3: note = Any Amino Acid
  VARIANT 8: note = Any Amino Acid
IGXIYPGXGDTNYN

SEQ ID NO: 1663 - protein, 112 aa, synthetic construct
  REGION 1..112: note = Description of Artificial Sequence: Synthetic polypeptide
  REGION 1..112: note = Synthetic Construct
DIVMTQTPLSLSVTPGQPASISCRSSQSLVHSNGYTYLHWYLQKPGQSPQLLIYKVSNRFSGVPDRFSGSGSGTDFTLKISRVEAEDVGVYYCSQSTRVPYTFGQGTKLEIK

SEQ ID NO: 1664 - protein, 112 aa, synthetic construct
  REGION 1..112: note = Description of Artificial Sequence: Synthetic polypeptide
  REGION 1..112: note = Synthetic Construct
DVVMTQTPLSLSVTPGQPASISCRSSQSLVHSNGYTYLHWYLQKPGQSPQLLIYKVSNRFSGVPDRFSGSGSGTDFTLKISRVEAEDVGVYYCSQSTRVPYTFGQGTKLEIK

SEQ ID NO: 1665 - protein, 123 aa, synthetic construct
  REGION 1..123: note = Description of Artificial Sequence: Synthetic polypeptide
  REGION 1..123: note = Synthetic Construct
QVQLVQSGAEVKKPGASVKVSCKASGYAFSSSWMNWVRQAPGQGLEWMGRIYPGDGDTNYAQKFQGRVTMTRDTSTSTVYMELSSLRSEDTAVYYCARLLRNQPGESYAMDYWGQGTLVTVSS

SEQ ID NO: 1666 - protein, 123 aa, synthetic construct
  REGION 1..123: note = Description of Artificial Sequence: Synthetic polypeptide
  REGION 1..123: note = Synthetic Construct
QVQLVQSGAEVKKPGASVKVSCKASGYAFSSSWMNWVRQAPGQGLEWIGRIYPGDGDTNYAQKFQGRVTMTADTSTSTVYMELSSLRSEDTAVYYCARLLRNQPGESYAMDYWGQGTLVTVSS

SEQ ID NO: 1667 - protein, 123 aa, synthetic construct
  REGION 1..123: note = Description of Artificial Sequence: Synthetic polypeptide
  REGION 1..123: note = Synthetic Construct
QVQLVQSGAEVKKPGASLKISCKASGYAFSSSWMNWVRQAPGQGLEWIGRIYPGDGDTNYAQKFQGRATLTADTSTSTAYMELSSLRSEDTAVYYCARLLRNQPGESYAMDYWGQGALVTVSS

SEQ ID NO: 1668 - protein, 32 aa, synthetic construct
  REGION 1..32: note = Description of Artificial Sequence: Synthetic polypeptide
  REGION 1..32: note = Synthetic Construct
GVPDRFSGSGSGTDFTLKISRVEADDLGVYFC

SEQ ID NO: 1669 - protein, 112 aa, synthetic construct
  REGION 1..112: note = Description of Artificial Sequence: Synthetic polypeptide
  REGION 1..112: note = Synthetic Construct
DVVMTQTPLTLSVTIGQPASISCKSSQSLLYSNGKTFLSWLLQRPGQSPKRLIYLVSKLDSGVPDRFAGSGSGTDFTLKISRLEADDLGIYYCMQGTHFPLTFGAGTKLELK

SEQ ID NO: 1670 - protein, 112 aa, synthetic construct
  REGION 1..112: note = Description of Artificial Sequence: Synthetic polypeptide
  REGION 1..112: note = Synthetic Construct
DVVMTQTPLSLPVSLGDQASISCRSSQSLVHSNGYTYLHWYLQKPGQSPKLLIYKVSNRFSGVPDRFSGSGSGTDFTLKISRVEADDLGVYFCSQSTRVPYTFGGGTKLEIK

SEQ ID NO: 1671 - protein, 126 aa, Homo sapiens; identical to SEQ ID NO: 801

SEQ ID NO: 1672 - protein, 132 aa, synthetic construct; identical to SEQ ID NO: 820
  REGION 1..132: note = Description of Artificial Sequence: Synthetic polypeptide
  REGION 1..132: note = Consensus Sequence
  VARIANT 1..2: note = Any Amino Acid
  VARIANT 5: note = Any naturally occurring amino acid
  VARIANT 8: note = Any naturally occurring amino acid
  VARIANT 12..22: note = Any naturally occurring amino acid
  VARIANT 24: note = Any naturally occurring amino acid
  VARIANT 26: note = Any naturally occurring amino acid
  VARIANT 31: note = Any naturally occurring amino acid
  VARIANT 33: note = Any naturally occurring amino acid
  VARIANT 35: note = Any naturally occurring amino acid
  VARIANT 37: note = Any naturally occurring amino acid
  VARIANT 39..47: note = Any naturally occurring amino acid
  VARIANT 49: note = Any naturally occurring amino acid
  VARIANT 52..59: note = Any naturally occurring amino acid
  VARIANT 61: note = Any naturally occurring amino acid
  VARIANT 63: note = Any naturally occurring amino acid
  VARIANT 65..77: note = Any naturally occurring amino acid
  VARIANT 79..83: note = Any naturally occurring amino acid
  VARIANT 85: note = Any Amino Acid
  VARIANT 88: note = Any Amino Acid
  VARIANT 89..90: note = Any naturally occurring amino acid
  VARIANT 92..93: note = Any naturally occurring amino acid
  VARIANT 95: note = Any naturally occurring amino acid
  VARIANT 97..99: note = Any naturally occurring amino acid
  VARIANT 101..103: note = Any naturally occurring amino acid
  VARIANT 105: note = Any naturally occurring amino acid
  VARIANT 107: note = Any naturally occurring amino acid
  VARIANT 109: note = Any naturally occurring amino acid
  VARIANT 111..115: note = Any naturally occurring amino acid
  VARIANT 117..123: note = Any naturally occurring amino acid
  VARIANT 125..131: note = Any naturally occurring amino acid

SEQ ID NO: 1673 - protein, 118 aa, Homo sapiens; identical to SEQ ID NO: 803

SEQ ID NO: 1674 - protein, 121 aa, Homo sapiens; identical to SEQ ID NO: 804

SEQ ID NO: 1675 - protein, 120 aa, Mus musculus; identical to SEQ ID NO: 805

SEQ ID NO: 1676 - protein, 121 aa, Mus musculus; identical to SEQ ID NO: 806

SEQ ID NO: 1677 - protein, 121 aa, Mus musculus; identical to SEQ ID NO: 807

SEQ ID NO: 1678 - protein, 112 aa, Homo sapiens; identical to SEQ ID NO: 808

SEQ ID NO: 1679 - protein, 109 aa, Homo sapiens; identical to SEQ ID NO: 809

SEQ ID NO: 1680 - protein, 114 aa, Homo sapiens; identical to SEQ ID NO: 810

SEQ ID NO: 1681 - protein, 120 aa, Homo sapiens
HLEQPQISSTKTLSKTARLECVVSGITISATSVYWYRERPGEVIQFLVSISYDGTVRKESGIPSGKFEVDRIPETSTSTLTIHNVEKQDIATYYCALWEAQQELGKKIKVFGPGTKLIIT

SEQ ID NO: 1682 - protein, 119 aa, Homo sapiens; identical to SEQ ID NO: 812

SEQ ID NO: 1683 - protein, 116 aa, Homo sapiens; identical to SEQ ID NO: 813

SEQ ID NO: 1684 - protein, 115 aa, Mus musculus; identical to SEQ ID NO: 814

SEQ ID NO: 1685 - protein, 103 aa, Mus musculus; identical to SEQ ID NO: 815

SEQ ID NO: 1686 - protein, 113 aa, Homo sapiens; identical to SEQ ID NO: 816

SEQ ID NO: 1687 - protein, 115 aa, Homo sapiens; identical to SEQ ID NO: 817

SEQ ID NO: 1688 - protein, 105 aa, Homo sapiens; identical to SEQ ID NO: 802

SEQ ID NO: 1689 - protein, 107 aa, synthetic construct; identical to SEQ ID NO: 821
  REGION 1..107: note = Description of Artificial Sequence: Synthetic polypeptide
  REGION 1..107: note = Consensus Sequence
  VARIANT 3..4: note = Any Amino Acid
  VARIANT 8: note = Any naturally occurring amino acid
  VARIANT 11..12: note = Any naturally occurring amino acid
  VARIANT 14..16: note = Any naturally occurring amino acid
  VARIANT 18..25: note = Any naturally occurring amino acid
  VARIANT 28: note = Any naturally occurring amino acid
  VARIANT 30: note = Any naturally occurring amino acid
  VARIANT 32: note = Any naturally occurring amino acid
  VARIANT 34: note = Any naturally occurring amino acid
  VARIANT 36..38: note = Any naturally occurring amino acid
  VARIANT 40..44: note = Any naturally occurring amino acid
  VARIANT 48..49: note = Any naturally occurring amino acid
  VARIANT 51..54: note = Any naturally occurring amino acid
  VARIANT 56..76: note = Any naturally occurring amino acid
  VARIANT 78..81: note = Any naturally occurring amino acid
  VARIANT 82: note = Any Amino Acid
  VARIANT 84: note = Any Amino Acid
  VARIANT 85..87: note = Any naturally occurring amino acid
  VARIANT 89: note = Any naturally occurring amino acid
  VARIANT 91..95: note = Any naturally occurring amino acid
  VARIANT 99..100: note = Any naturally occurring amino acid
  VARIANT 102: note = Any naturally occurring amino acid

SEQ ID NO: 1690 - protein, 101 aa, synthetic construct
  REGION 1..101: note = Description of Artificial Sequence: Synthetic polypeptide
  REGION 1..101: note = Synthetic Construct
DIVMTQTPLSLSVTPGQPASISCKSSQSLLHSDGKTYLYWYLQKPGQSPQLLIYEVSNRFSGVPDRFSGSGSGTDFTLKISRVEAEDVGVYYCMQSIQLPP

SEQ ID NO: 1691 - protein, 12 aa, synthetic construct
  REGION 1..12: note = Description of Artificial Sequence: Synthetic peptide
  REGION 1..12: note = Synthetic Construct
YTFGQGTKLEIK

SEQ ID NO: 1692 - protein, 112 aa, synthetic construct; identical to SEQ ID NO: 1670
  REGION 1..112: note = Description of Artificial Sequence: Synthetic polypeptide
  REGION 1..112: note = Synthetic Construct

SEQ ID NO: 1693 - protein, 111 aa, synthetic construct
  REGION 1..111: note = Description of Artificial Sequence: Synthetic polypeptide
  REGION 1..111: note = Synthetic Construct
DIVMTQTPLSLSVTPGQPASISCKSSQSLLHSDGKTYLYWYLQKPGQSPQLLIYEVSNRFSGVPDRFSGSGSGTDFTLKISRVEAEDVGVYYCMQSIQLPPFGQGTKLEIK

SEQ ID NO: 1694 - protein, 112 aa, synthetic construct; identical to SEQ ID NO: 1663
  REGION 1..112: note = Description of Artificial Sequence: Synthetic polypeptide
  REGION 1..112: note = Synthetic Construct

SEQ ID NO: 1695 - protein, 112 aa, synthetic construct; identical to SEQ ID NO: 1664
  REGION 1..112: note = Description of Artificial Sequence: Synthetic polypeptide
  REGION 1..112: note = Synthetic Construct

SEQ ID NO: 1696 - protein, 98 aa, synthetic construct
  REGION 1..98: note = Description of Artificial Sequence: Synthetic polypeptide
  REGION 1..98: note = Synthetic Construct
QVQLVQSGAEVKKPGASVKVSCKASGYTFTSYYMHWVRQAPGQGLEWMGIINPSGGSTSYAQKFQGRVTMTRDTSTSTVYMELSSLRSEDTAVYYCAR

SEQ ID NO: 1697 - protein, 15 aa, synthetic construct
  REGION 1..15: note = Description of Artificial Sequence: Synthetic peptide
  REGION 1..15: note = Synthetic Construct
YFDYWGQGTLVTVSS

SEQ ID NO: 1698 - protein, 123 aa, synthetic construct; identical to SEQ ID NO: 1341
  REGION 1..123: note = Description of Artificial Sequence: Synthetic polypeptide
  REGION 1..123: note = Synthetic Construct

SEQ ID NO: 1699 - protein, 109 aa, synthetic construct
  REGION 1..109: note = Description of Artificial Sequence: Synthetic polypeptide
  REGION 1..109: note = Synthetic Construct
QVQLVQSGAEVKKPGASVKVSCKASGYTFTSYYMHWVRQAPGQGLEWMGIINPSGGSTSYAQKFQGRVTMTRDTSTSTVYMELSSLRSEDTAVYYCARWGQGTLVTVSS

SEQ ID NO: 1700 - protein, 123 aa, synthetic construct; identical to SEQ ID NO: 1665
  REGION 1..123: note = Description of Artificial Sequence: Synthetic polypeptide
  REGION 1..123: note = Synthetic Construct

SEQ ID NO: 1701 - protein, 123 aa, synthetic construct; identical to SEQ ID NO: 1666
  REGION 1..123: note = Description of Artificial Sequence: Synthetic polypeptide
  REGION 1..123: note = Synthetic Construct

SEQ ID NO: 1702 - protein, 123 aa, synthetic construct; identical to SEQ ID NO: 1667
  REGION 1..123: note = Description of Artificial Sequence: Synthetic polypeptide
  REGION 1..123: note = Synthetic Construct

SEQ ID NO: 1703 - skipped

SEQ ID NO: 1704 - protein, 9 aa, synthetic construct
  REGION 1..9: note = Description of Artificial Sequence: Synthetic peptide
  REGION 1..9: note = Synthetic Construct
  VARIANT 5: note = F or V
  VARIANT 7: note = G or E
GDLWXPXES

SEQ ID NO: 1705 - protein, 21 aa, synthetic construct
  REGION 1..21: note = Description of Artificial Sequence: Synthetic peptide
  REGION 1..21: note = Synthetic Construct
MEVGWYRSPFSRVVHLYRNGK

SEQ ID NO: 1706 - protein, 110 aa, synthetic construct; identical to SEQ ID NO: 207
  REGION 1..110: note = Description of Artificial Sequence: Synthetic polypeptide
  REGION 1..110: note = Synthetic Construct

SEQ ID NO: 1707 - protein, 113 aa, synthetic construct; identical to SEQ ID NO: 3
  REGION 1..113: note = Description of Artificial Sequence: Synthetic polypeptide
  REGION 1..113: note = Synthetic Construct

SEQ ID NO: 1708 - protein, 17 aa, synthetic construct
  REGION 1..17: note = Description of Artificial Sequence: Synthetic peptide
  REGION 1..17: note = Synthetic Construct
RIYPGDGDTNYNGEFRV

SEQ ID NO: 1709 - protein, 227 aa, Mus musculus; identical to SEQ ID NO: 822

SEQ ID NO: 1710 - protein, 228 aa, Rattus norvegicus; identical to SEQ ID NO: 823

SEQ ID NO: 1711 - protein, 260 aa, Macaca mulatta; identical to SEQ ID NO: 824

SEQ ID NO: 1712 - protein, 230 aa, Macaca fascicularis
MEPLRLLILLFATELSGAHNTTVFQGVEGQSLQVSCPYDSMKHWGRRKAWCRQLGEKGPCQRVVSTHNLWLLSFLRRRNGSTAITDDTLGGTLTITLRNLQPHDAGFYQCQSLHGSEADTLRKVLVEVLADPLDHRDAGDLWVPGESESFEDAHVEHSISRSLLEGEIPFPPTSVLLLLACIFLIKILAASALWAAAWHGQKPGTHPPSEPDCGHDPGHQLQTLPGLRDT

SEQ ID NO: 1713 - protein, 230 aa, Equus caballus; identical to SEQ ID NO: 826

SEQ ID NO: 1714 - protein, 233 aa, Sus scrofa; identical to SEQ ID NO: 827

SEQ ID NO: 1715 - protein, 230 aa, Canis lupus; identical to SEQ ID NO: 828
  source 1..230: note = Canis familiaris

SEQ ID NO: 1716 - protein, 26 aa, synthetic construct
  REGION 1..26: note = Description of Artificial Sequence: Synthetic peptide
  REGION 1..26: note = Synthetic Construct
QVQLVQSGAEVKKPGSSVKVSCKASG

SEQ ID NO: 1717 - protein, 26 aa, synthetic construct
  REGION 1..26: note = Description of Artificial Sequence: Synthetic peptide
  REGION 1..26: note = Synthetic Construct
EVQLVQSGAEVKKPGSSVKVSCKASG

SEQ ID NO: 1718 - protein, 26 aa, synthetic construct
  REGION 1..26: note = Description of Artificial Sequence: Synthetic peptide
  REGION 1..26: note = Synthetic Construct
QVQLVQSGAEVKKPGASVKVSCKASG

SEQ ID NO: 1719 - protein, 14 aa, synthetic construct
  REGION 1..14: note = Description of Artificial Sequence: Synthetic peptide
  REGION 1..14: note = Synthetic Construct
WVRQAPGQGLEWMG

SEQ ID NO: 1720 - protein, 14 aa, synthetic construct
  REGION 1..14: note = Description of Artificial Sequence: Synthetic peptide
  REGION 1..14: note = Synthetic Construct
WVRQAPGQRLEWIG

SEQ ID NO: 1721 - protein, 30 aa, synthetic construct
  REGION 1..30: note = Description of Artificial Sequence: Synthetic polypeptide
  REGION 1..30: note = Synthetic Construct
RVTITADESTSTAYMELSSLRSEDTAVYYC

SEQ ID NO: 1722 - protein, 30 aa, synthetic construct
  REGION 1..30: note = Description of Artificial Sequence: Synthetic polypeptide
  REGION 1..30: note = Synthetic Construct
RVTITADTSASTAYMELSSLRSEDTAVYYC

SEQ ID NO: 1723 - protein, 11 aa, synthetic construct
  REGION 1..11: note = Description of Artificial Sequence: Synthetic peptide
  REGION 1..11: note = Synthetic Construct
WGQGTLVTVSS

SEQ ID NO: 1724 - protein, 23 aa, synthetic construct
  REGION 1..23: note = Description of Artificial Sequence: Synthetic peptide
  REGION 1..23: note = Synthetic Construct
DVVMTQTPLSLSVTPGQPASISC

SEQ ID NO: 1725 - protein, 23 aa, synthetic construct
  REGION 1..23: note = Description of Artificial Sequence: Synthetic peptide
  REGION 1..23: note = Synthetic Construct
GVVMTQTPLSLSVTPGQPASISC

SEQ ID NO: 1726 - protein, 23 aa, synthetic construct
  REGION 1..23: note = Description of Artificial Sequence: Synthetic peptide
  REGION 1..23: note = Synthetic Construct
GVVMAQTPLSLSVTPGQPASISC

SEQ ID NO: 1727 - protein, 23 aa, synthetic construct
  REGION 1..23: note = Description of Artificial Sequence: Synthetic peptide
  REGION 1..23: note = Synthetic Construct
DVVMTQSPDSLAVSLGERATINC

SEQ ID NO: 1728 - protein, 15 aa, synthetic construct
  REGION 1..15: note = Description of Artificial Sequence: Synthetic peptide
  REGION 1..15: note = Synthetic Construct
WYLQKPGQSPQLLIY

SEQ ID NO: 1729 - protein, 15 aa, synthetic construct
  REGION 1..15: note = Description of Artificial Sequence: Synthetic peptide
  REGION 1..15: note = Synthetic Construct
WYQQKPGQSPKLLIY

SEQ ID NO: 1730 - protein, 32 aa, synthetic construct
  REGION 1..32: note = Description of Artificial Sequence: Synthetic polypeptide
  REGION 1..32: note = Synthetic Construct
GVPDRFSGSGSGTDFTLKISRVEAEDVGVYYC

SEQ ID NO: 1731 - protein, 32 aa, synthetic construct
  REGION 1..32: note = Description of Artificial Sequence: Synthetic polypeptide
  REGION 1..32: note = Synthetic Construct
GVPDRFSGSGSGTDFTLTISSLQAEDVAVYYC

SEQ ID NO: 1732 - protein, 10 aa, synthetic construct
  REGION 1..10: note = Description of Artificial Sequence: Synthetic peptide
  REGION 1..10: note = Synthetic Construct
FGQGTKLEIK

SEQ ID NO: 1733 - protein, 10 aa, synthetic construct
  REGION 1..10: note = Description of Artificial Sequence: Synthetic peptide
  REGION 1..10: note = Synthetic Construct
FGGGTKVEIK

SEQ ID NO: 1734 - protein, 123 aa, synthetic construct
  REGION 1..123: note = Description of Artificial Sequence: Synthetic polypeptide
  REGION 1..123: note = Synthetic Construct
QVQLVQSGAEVKKPGSSVKVSCKASGYAFSSSWMNWVRQAPGQGLEWMGRIYPGDGDTNYAQKFQGRVTITADESTSTAYMELSSLRSEDTAVYYCARLLRNQPGESYAMDYWGQGTLVTVSS

SEQ ID NO: 1735 - protein, 123 aa, synthetic construct
  REGION 1..123: note = Description of Artificial Sequence: Synthetic polypeptide
  REGION 1..123: note = Synthetic Construct
QVQLVQSGAEVKKPGSSVKVSCKASGYAFSSSWMNWVRQAPGQGLEWMGRIYPGGGDTNYAQKFQGRVTITADESTSTAYMELSSLRSEDTAVYYCARLLRNQPGESYAMDYWGQGTLVTVSS

SEQ ID NO: 1736 - protein, 123 aa, synthetic construct
  REGION 1..123: note = Description of Artificial Sequence: Synthetic polypeptide
  REGION 1..123: note = Synthetic Construct
QVQLVQSGAEVKKPGSSVKVSCKASGYAFSSSWMNWVRQAPGQGLEWMGRIYPGEGDTNYAQKFQGRVTITADESTSTAYMELSSLRSEDTAVYYCARLLRNQPGESYAMDYWGQGTLVTVSS

SEQ ID NO: 1737 - protein, 123 aa, synthetic construct
  REGION 1..123: note = Description of Artificial Sequence: Synthetic polypeptide
  REGION 1..123: note = Synthetic Construct
QVQLVQSGAEVKKPGSSVKVSCKASGYAFSSSWMNWVRQAPGQGLEWMGRIYPGQGDTNYAQKFQGRVTITADESTSTAYMELSSLRSEDTAVYYCARLLRNQPGESYAMDYWGQGTLVTVSS

SEQ ID NO: 1738 - protein, 123 aa, synthetic construct
  REGION 1..123: note = Description of Artificial Sequence: Synthetic polypeptide
  REGION 1..123: note = Synthetic Construct
QVQLVQSGAEVKKPGSSVKVSCKASGYAFSLSWMNWVRQAPGQGLEWMGRIYPGDGDTNYAQKFRGRVTITADESTSTAYMELSSLRSEDTAVYYCARLLRNQPGESYAMDYWGQGTLVTVSS

SEQ ID NO: 1739 - protein, 123 aa, synthetic construct
  REGION 1..123: note = Description of Artificial Sequence: Synthetic polypeptide
  REGION 1..123: note = Synthetic Construct
QVQLVQSGAEVKKPGSSVKVSCKASGYAFSLSWMNWVRQAPGQGLEWMGRIYPGDGDTNYARKFQGRVTITADESTSTAYMELSSLRSEDTAVYYCARLLRNQPGSSYAMDYWGQGTLVTVSS

SEQ ID NO: 1740 - protein, 123 aa, synthetic construct
  REGION 1..123: note = Description of Artificial Sequence: Synthetic polypeptide
  REGION 1..123: note = Synthetic Construct
QVQLVQSGAEVKKPGSSVKVSCKASGYAFSRSWMNWVRQAPGQGLEWMGRIYPGDGDTNYAQKFQGRVTITADESTSTAYMELSSLRSEDTAVYYCARLLRNQPGASYAMDYWGQGTLVTVSS

SEQ ID NO: 1741 - protein, 123 aa, synthetic construct
  REGION 1..123: note = Description of Artificial Sequence: Synthetic polypeptide
  REGION 1..123: note = Synthetic Construct
QVQLVQSGAEVKKPGSSVKVSCKASGYAFSSDWMNWVRQAPGQGLEWMGRIYPGDGDTNYAQKFQGRVTITADESTSTAYMELSSLRSEDTAVYYCARLLRNQPGESYAMDYWGQGTLVTVSS

SEQ ID NO: 1742 - protein, 123 aa, synthetic construct
  REGION 1..123: note = Description of Artificial Sequence: Synthetic polypeptide
  REGION 1..123: note = Synthetic Construct
QVQLVQSGAEVKKPGSSVKVSCKASGYAFSSDWMNWVRQAPGQGLEWMGRIYPGDGDTNYARKFQGRVTITADESTSTAYMELSSLRSEDTAVYYCARLLRNQPGESYAMDYWGQGTLVTVSS

SEQ ID NO: 1743 - protein, 123 aa, synthetic construct
  REGION 1..123: note = Description of Artificial Sequence: Synthetic polypeptide
  REGION 1..123: note = Synthetic Construct
QVQLVQSGAEVKKPGSSVKVSCKASGYAFSSHWMNWVRQAPGQGLEWMGRIYPGDGDTNYAHKFQGRVTITADESTSTAYMELSSLRSEDTAVYYCARLLRNQPGESYAMDYWGQGTLVTVSS

SEQ ID NO: 1744 - protein, 123 aa, synthetic construct
  REGION 1..123: note = Description of Artificial Sequence: Synthetic polypeptide
  REGION 1..123: note = Synthetic Construct
QVQLVQSGAEVKKPGSSVKVSCKASGYAFSSHWMNWVRQAPGQGLEWMGRIYPGDGDTNYAQKFKGRVTITADESTSTAYMELSSLRSEDTAVYYCARLLRNQPGESYAMDYWGQGTLVTVSS

SEQ ID NO: 1745 - protein, 123 aa, synthetic construct
  REGION 1..123: note = Description of Artificial Sequence: Synthetic polypeptide
  REGION 1..123: note = Synthetic Construct
QVQLVQSGAEVKKPGSSVKVSCKASGYAFSSHWMNWVRQAPGQGLEWMGRIYPGDGDTNYAQKFQGRVTITADESTSTAYMELSSLRSEDTAVYYCARLLRNQPGESYAMDYWGQGTLVTVSS

SEQ ID NO: 1746 - protein, 123 aa, synthetic construct
  REGION 1..123: note = Description of Artificial Sequence: Synthetic polypeptide
  REGION 1..123: note = Synthetic Construct
QVQLVQSGAEVKKPGSSVKVSCKASGYAFSSHWMNWVRQAPGQGLEWMGRIYPGDGDTNYAQKFRGRVTITADESTSTAYMELSSLRSEDTAVYYCARLLRNQPGASYAMDYWGQGTLVTVSS

SEQ ID NO: 1747 - protein, 123 aa, synthetic construct
  REGION 1..123: note = Description of Artificial Sequence: Synthetic polypeptide
  REGION 1..123: note = Synthetic Construct
QVQLVQSGAEVKKPGSSVKVSCKASGYAFSSHWMNWVRQAPGQGLEWMGRIYPGDGDTNYAQKRQGRVTITADESTSTAYMELSSLRSEDTAVYYCARLLRNQPGESYAMDYWGQGTLVTVSS

SEQ ID NO: 1748 - protein, 123 aa, synthetic construct
  REGION 1..123: note = Description of Artificial Sequence: Synthetic polypeptide
  REGION 1..123: note = Synthetic Construct
QVQLVQSGAEVKKPGSSVKVSCKASGYAFSSHWMNWVRQAPGQGLEWMGRIYPGDGDTNYAQKWQGRVTITADESTSTAYMELSSLRSEDTAVYYCARLLRNQPGSSYAMDYWGQGTLVTVSS

SEQ ID NO: 1749 - protein, 123 aa, synthetic construct
  REGION 1..123: note = Description of Artificial Sequence: Synthetic polypeptide
  REGION 1..123: note = Synthetic Construct
QVQLVQSGAEVKKPGSSVKVSCKASGYAFSSHWMNWVRQAPGQGLEWMGRIYPGDGDTNYARKFQGRVTITADESTSTAYMELSSLRSEDTAVYYCARLLRNQPGESYAMDYWGQGTLVTVSS

SEQ ID NO: 1750 - protein, 123 aa, synthetic construct
  REGION 1..123: note = Description of Artificial Sequence: Synthetic polypeptide
  REGION 1..123: note = Synthetic Construct
QVQLVQSGAEVKKPGSSVKVSCKASGYAFSSHWMNWVRQAPGQGLEWMGRIYPGDGDTNYAWKFQGRVTITADESTSTAYMELSSLRSEDTAVYYCARLLRNQPGESYAMDYWGQGTLVTVSS

SEQ ID NO: 1751 - protein, 123 aa, synthetic construct
  REGION 1..123: note = Description of Artificial Sequence: Synthetic polypeptide
  REGION 1..123: note = Synthetic Construct
QVQLVQSGAEVKKPGSSVKVSCKASGYAFSSHWMNWVRQAPGQGLEWMGRIYPGDGDTNYAYKFQGRVTITADESTSTAYMELSSLRSEDTAVYYCARLLRNQPGESYAMDYWGQGTLVTVSS

SEQ ID NO: 1752 - protein, 123 aa, synthetic construct
  REGION 1..123: note = Description of Artificial Sequence: Synthetic polypeptide
  REGION 1..123: note = Synthetic Construct
QVQLVQSGAEVKKPGSSVKVSCKASGYAFSSHWMNWVRQAPGQGLEWMGRIYPGDGQTNYAQKRQGRVTITADESTSTAYMELSSLRSEDTAVYYCARLLRNQPGESYAMDYWGQGTLVTVSS

SEQ ID NO: 1753 - protein, 123 aa, synthetic construct
  REGION 1..123: note = Description of Artificial Sequence: Synthetic polypeptide
  REGION 1..123: note = Synthetic Construct
QVQLVQSGAEVKKPGSSVKVSCKASGYAFSSHWMNWVRQAPGQGLEWMGRIYPGGGDTNYAQKFQGRVTITADESTSTAYMELSSLRSEDTAVYYCARLLRNQPGESYAMDYWGQGTLVTVSS

SEQ ID NO: 1754 - protein, 123 aa, synthetic construct
  REGION 1..123: note = Description of Artificial Sequence: Synthetic polypeptide
  REGION 1..123: note = Synthetic Construct
QVQLVQSGAEVKKPGSSVKVSCKASGYAFSSHWMNWVRQAPGQGLEWMGRIYPGGGDTNYAQKFRGRVTITADESTSTAYMELSSLRSEDTAVYYCARLLRNQPGESYAMDYWGQGTLVTVSS

SEQ ID NO: 1755 - protein, 123 aa, synthetic construct
  REGION 1..123: note = Description of Artificial Sequence: Synthetic polypeptide
  REGION 1..123: note = Synthetic Construct
QVQLVQSGAEVKKPGSSVKVSCKASGYAFSSHWMNWVRQAPGQGLEWMGRIYPGGGDTNYAQKRQGRVTITADESTSTAYMELSSLRSEDTAVYYCARLLRNQPGESYAMDYWGQGTLVTVSS

SEQ ID NO: 1756 - protein, 123 aa, synthetic construct
  REGION 1..123: note = Description of Artificial Sequence: Synthetic polypeptide
  REGION 1..123: note = Synthetic Construct
QVQLVQSGAEVKKPGSSVKVSCKASGYAFSSHWMNWVRQAPGQGLEWMGRIYPGQGDTNYAQKFQGRVTITADESTSTAYMELSSLRSEDTAVYYCARLLRNQPGESYAMDYWGQGTLVTVSS

SEQ ID NO: 1757 - protein, 123 aa, synthetic construct
  REGION 1..123: note = Description of Artificial Sequence: Synthetic polypeptide
  REGION 1..123: note = Synthetic Construct
QVQLVQSGAEVKKPGSSVKVSCKASGYAFSSHWMNWVRQAPGQGLEWMGRIYPGVGDTNYAQKFQGRVTITADESTSTAYMELSSLRSEDTAVYYCARLLRNQPGESYAMDYWGQGTLVTVSS

SEQ ID NO: 1758 - protein, 123 aa, synthetic construct
  REGION 1..123: note = Description of Artificial Sequence: Synthetic polypeptide
  REGION 1..123: note = Synthetic Construct
QVQLVQSGAEVKKPGSSVKVSCKASGYAFSSQWMNWVRQAPGQGLEWMGRIYPGDGDTNYAQKFQGRVTITADESTSTAYMELSSLRSEDTAVYYCARLLRNQPGESYAMDYWGQGTLVTVSS

SEQ ID NO: 1759 - protein, 123 aa, synthetic construct
  REGION 1..123: note = Description of Artificial Sequence: Synthetic polypeptide
  REGION 1..123: note = Synthetic Construct
QVQLVQSGAEVKKPGSSVKVSCKASGYAFSSQWMNWVRQAPGQGLEWMGRIYPGDGDTNYAWKFQGRVTITADESTSTAYMELSSLRSEDTAVYYCARLLRNQPGESYAMDYWGQGTLVTVSS

SEQ ID NO: 1760 - protein, 123 aa, synthetic construct
  REGION 1..123: note = Description of Artificial Sequence: Synthetic polypeptide
  REGION 1..123: note = Synthetic Construct
QVQLVQSGAEVKKPGSSVKVSCKASGYAFSSQWMNWVRQAPGQGLEWMGRIYPGGGDTNYARKFQGRVTITADESTSTAYMELSSLRSEDTAVYYCARLLRNQPGESYAMDYWGQGTLVTVSS

SEQ ID NO: 1761 - protein, 123 aa, synthetic construct
  REGION 1..123: note = Description of Artificial Sequence: Synthetic polypeptide
  REGION 1..123: note = Synthetic Construct
QVQLVQSGAEVKKPGSSVKVSCKASGYAFSSEWMNWVRQAPGQGLEWMGRIYPGDGDTNYAQKFQGRVTITADESTSTAYMELSSLRSEDTAVYYCARLLRNQPGESYAMDYWGQGTLVTVSS

SEQ ID NO: 1762 - protein, 123 aa, synthetic construct
  REGION 1..123: note = Description of Artificial Sequence: Synthetic polypeptide
  REGION 1..123: note = Synthetic Construct
EVQLVQSGAEVKKPGSSVKVSCKASGYAFSSSWMNWVRQAPGQGLEWMGRIYPGDGDTNYAQKFQGRVTITADESTSTAYMELSSLRSEDTAVYYCARLLRNQPGESYAMDYWGQGTLVTVSS

SEQ ID NO: 1763 - protein, 123 aa, synthetic construct
  REGION 1..123: note = Description of Artificial Sequence: Synthetic polypeptide
  REGION 1..123: note = Synthetic Construct
QVQLVQSGAEVKKPGASVKVSCKASGYAFSSSWMNWVRQAPGQRLEWIGRIYPGDGDTNYAQKFQGRVTITADTSASTAYMELSSLRSEDTAVYYCARLLRNQPGESYAMDYWGQGTLVTVSS

SEQ ID NO: 1764 - protein, 123 aa, synthetic construct
  REGION 1..123: note = Description of Artificial Sequence: Synthetic polypeptide
  REGION 1..123: note = Synthetic Construct
QVQLVQSGAEVKKPGASVKVSCKASGYAFWSSWMNWVRQAPGQRLEWIGRIYPGDGDTNYAQKFQGRVTITADTSASTAYMELSSLRSEDTAVYYCARLLRNQPGESYAHDYWGQGTLVTVSS

SEQ ID NO: 1765 - protein, 123 aa, synthetic construct
  REGION 1..123: note = Description of Artificial Sequence: Synthetic polypeptide
  REGION 1..123: note = Synthetic Construct
QVQLVQSGAEVKKPGASVKVSCKASGYAFSSSWMNWVRQAPGQRLEWIGRIYPGDGDTNYARKFQGRVTITADTSASTAYMELSSLRSEDTAVYYCARLLRNQPGASYAMDYWGQGTLVTVSS

SEQ ID NO: 1766 - protein, 123 aa, synthetic construct
  REGION 1..123: note = Description of Artificial Sequence: Synthetic polypeptide
  REGION 1..123: note = Synthetic Construct
QVQLVQSGAEVKKPGASVKVSCKASGYAFSSQWMNWVRQAPGQRLEWIGRIYPGGGDTNYAGKFQGRVTITADTSASTAYMELSSLRSEDTAVYYCARLLRNQPGESYAMDYWGQGTLVTVSS

SEQ ID NO: 1767 - protein, 123 aa, synthetic construct
  REGION 1..123: note = Description of Artificial Sequence: Synthetic polypeptide
  REGION 1..123: note = Synthetic Construct
QVQLVQSGAEVKKPGSSVKVSCKASGYAFSSHWMNWVRQAPGQGLEWMGRIYPGGGDTNYAQKFRGRVTITADESTSTAYMELSSLRSEDTAVYYCARLLRNQPGASYAMDYWGQGTLVTVSS

SEQ ID NO: 1768 - protein, 123 aa, synthetic construct
  REGION 1..123: note = Description of Artificial Sequence: Synthetic polypeptide
  REGION 1..123: note = Synthetic Construct
QVQLVQSGAEVKKPGSSVKVSCKASGYAFSSHWMNWVRQAPGQGLEWMGRIYPGEGDTNYAQKFRGRVTITADESTSTAYMELSSLRSEDTAVYYCARLLRNQPGASYAMDYWGQGTLVTVSS

SEQ ID NO: 1769 - protein, 123 aa, synthetic construct
  REGION 1..123: note = Description of Artificial Sequence: Synthetic polypeptide
  REGION 1..123: note = Synthetic Construct
QVQLVQSGAEVKKPGSSVKVSCKASGYAFSSHWMNWVRQAPGQGLEWMGRIYPGGGDTNYARKFRGRVTITADESTSTAYMELSSLRSEDTAVYYCARLLRNQPGASYAMDYWGQGTLVTVSS

SEQ ID NO: 1770 - protein, 123 aa, synthetic construct
  REGION 1..123: note = Description of Artificial Sequence: Synthetic polypeptide
  REGION 1..123: note = Synthetic Construct
QVQLVQSGAEVKKPGSSVKVSCKASGYAFSSDWMNWVRQAPGQGLEWMGRIYPGEGDTNYARKFQGRVTITADESTSTAYMELSSLRSEDTAVYYCARLLRNKPGESYAMDYWGQGTLVTVSS

SEQ ID NO: 1771 - protein, 123 aa, synthetic construct
  REGION 1..123: note = Description of Artificial Sequence: Synthetic polypeptide
  REGION 1..123: note = Synthetic Construct
QVQLVQSGAEVKKPGSSVKVSCKASGYAFSSDWMNWVRQAPGQGLEWMGRIYPGEGDTNYARKFHGRVTITADESTSTAYMELSSLRSEDTAVYYCARLLRNKPGESYAMDYWGQGTLVTVSS

SEQ ID NO: 1772 - protein, 123 aa, synthetic construct
  REGION 1..123: note = Description of Artificial Sequence: Synthetic polypeptide
  REGION 1..123: note = Synthetic Construct
EVQLVQSGAEVKKPGSSVKVSCKASGYAFSSDWMNWVRQAPGQGLEWMGRIYPGEGDTNYARKFHGRVTITADESTSTAYMELSSLRSEDTAVYYCARLLRNKPGESYAMDYWGQGTLVTVSS

SEQ ID NO: 1773 - protein, 123 aa, synthetic construct
  REGION 1..123: note = Description of Artificial Sequence: Synthetic polypeptide
  REGION 1..123: note = Synthetic Construct
QVQLVQSGAEVKKPGSSVKVSCKASGYAFSSHWMNWVRQAPGQGLEWMGRIYPGEGDTNYAQKFHGRVTITADESTSTAYMELSSLRSEDTAVYYCARLLRNQPGESYAMDYWGQGTLVTVSS

SEQ ID NO: 1774 - protein, 123 aa, synthetic construct
  REGION 1..123: note = Description of Artificial Sequence: Synthetic polypeptide
  REGION 1..123: note = Synthetic Construct
EVQLVQSGAEVKKPGSSVKVSCKASGYAFSSHWMNWVRQAPGQGLEWMGRIYPGEGDTNYAQKFHGRVTITADESTSTAYMELSSLRSEDTAVYYCARLLRNQPGESYAMDYWGQGTLVTVSS

SEQ ID NO: 1775 - protein, 123 aa, synthetic construct
  REGION 1..123: note = Description of Artificial Sequence: Synthetic polypeptide
  REGION 1..123: note = Synthetic Construct
QVQLVQSGAEVKKPGSSVKVSCKASGYAFSSHWMNWVRQAPGQGLEWMGRIYPGEGDTNYAQKFHGRVTITADESTSTAYMELSSLRSEDTAVYYCARLLRNKPGESYAMDYWGQGTLVTVSS

SEQ ID NO: 1776 - protein, 123 aa, synthetic construct
  REGION 1..123: note = Description of Artificial Sequence: Synthetic polypeptide
  REGION 1..123: note = Synthetic Construct
EVQLVQSGAEVKKPGSSVKVSCKASGYAFSSHWMNWVRQAPGQGLEWMGRIYPGEGDTNYAQKFHGRVTITADESTSTAYMELSSLRSEDTAVYYCARLLRNKPGESYAMDYWGQGTLVTVSS

SEQ ID NO: 1777 - protein, 123 aa, synthetic construct
  REGION 1..123: note = Description of Artificial Sequence: Synthetic polypeptide
  REGION 1..123: note = Synthetic Construct
QVQLVQSGAEVKKPGSSVKVSCKASGYAFSSQWMNWVRQAPGQGLEWMGRIYPGEGDTNYARKFQGRVTITADESTSTAYMELSSLRSEDTAVYYCARLLRNQPGESYAMDYWGQGTLVTVSS

SEQ ID NO: 1778 - protein, 123 aa, synthetic construct
  REGION 1..123: note = Description of Artificial Sequence: Synthetic polypeptide
  REGION 1..123: note = Synthetic Construct
QVQLVQSGAEVKKPGASVKVSCKASGYAFSSQWMNWVRQAPGQRLEWIGRIYPGEGDTNYAGKFQGRVTITADTSASTAYMELSSLRSEDTAVYYCARLLRNQPGESYAMDYWGQGTLVTVSS

SEQ ID NO: 1779 - protein, 123 aa, synthetic construct
  REGION 1..123: note = Description of Artificial Sequence: Synthetic polypeptide
  REGION 1..123: note = Synthetic Construct
QVQLVQSGAEVKKPGSSVKVSCKASGYAFSSSWMNWVRQAPGQGLEWMGRIYPGDGDTNYAQKFQGRATITADTSTSTAYMELSSLRSEDTAVYYCARLLRNQPGESYAMDYWGQGTLVTVSS

SEQ ID NO: 1780 - protein, 123 aa, synthetic construct; identical to SEQ ID NO: 1665
  REGION 1..123: note = Description of Artificial Sequence: Synthetic polypeptide
  REGION 1..123: note = Synthetic Construct

SEQ ID NO: 1781 - protein, 123 aa, synthetic construct; identical to SEQ ID NO: 1666
  REGION 1..123: note = Description of Artificial Sequence: Synthetic polypeptide
  REGION 1..123: note = Synthetic Construct

SEQ ID NO: 1782 - protein, 123 aa, synthetic construct; identical to SEQ ID NO: 1667
  REGION 1..123: note = Description of Artificial Sequence: Synthetic polypeptide
  REGION 1..123: note = Synthetic Construct

SEQ ID NO: 1783 - protein, 123 aa, synthetic construct
  REGION 1..123: note = Description of Artificial Sequence: Synthetic polypeptide
  REGION 1..123: note = Synthetic Construct
QVQLVQSGAEVVKPGASLKISCKASGYAFSSSWMNWVRQAPGQGLEWIGRIYPGDGDTNYNQKFQGRATLTADTSTSTAYMELSSLRSEDTAVYFCARLLRNQPGESYAMDYWGQGALVTVSS

SEQ ID NO: 1784 - protein, 123 aa, synthetic construct
  REGION 1..123: note = Description of Artificial Sequence: Synthetic polypeptide
  REGION 1..123: note = Synthetic Construct
QVQLVQSGAEVKKPGASLKISCKASGYAFSSSWMNWVRQAPGQGLEWIGRIYPGDGDTNYNGEFRVRATLTADTSTSTAYMELSSLRSEDTAVYYCARLLRNQPGESYAMDYWGQGALVTVSS

SEQ ID NO: 1785 - protein, 123 aa, synthetic construct
  REGION 1..123: note = Description of Artificial Sequence: Synthetic polypeptide
  REGION 1..123: note = Synthetic Construct
QVQLVQSGAEVKKPGASVKVSCKASGYAFSSSWMNWVRQAPGQGLEWIGRIYPGDGDTNYNGEFRVRATLTADTSTSTAYMELSSLRSEDTAVYFCARLLRNQPGESYAMDYWGQGTLVTVSS

SEQ ID NO: 1786 - protein, 123 aa, synthetic construct
  REGION 1..123: note = Description of Artificial Sequence: Synthetic polypeptide
  REGION 1..123: note = Synthetic Construct
QVQLVQSGAEVKKPGASVKVSCKASGYAFSSSWMNWVRQAPGQGLEWIGRIYPGDGDTNYAQKFQGRATLTADTSTSTAYMELSSLRSEDTAVYFCARLLRNQPGESYAMDYWGQGTLVTVSS

SEQ ID NO: 1787 - protein, 123 aa, synthetic construct
  REGION 1..123: note = Description of Artificial Sequence: Synthetic polypeptide
  REGION 1..123: note = Synthetic Construct
QVQLVQSGAEVKKPGASVKVSCKASGYAFSSSWMNWVRQAPGQGLEWIGRIYPGDGDTNYAQKFQGRATMTADTSTSTAYMELSSLRSEDTAVYYCARLLRNQPGESYAMDYWGQGTLVTVSS

SEQ ID NO: 1788 - protein, 123 aa, synthetic construct
  REGION 1..123: note = Description of Artificial Sequence: Synthetic polypeptide
  REGION 1..123: note = Synthetic Construct
QVQLVQSGAEVKKPGASVKVSCKASGYAFSSSWMNWVRQAPGQGLEWMGRIYPGDGDTNYAQKFQGRVTMTADTSTSTAYMELSSLRSEDTAVYYCARLLRNQPGESYAMDYWGQGTLVTVSS

SEQ ID NO: 1789 - protein, 123 aa, synthetic construct
  REGION 1..123: note = Description of Artificial Sequence: Synthetic polypeptide
  REGION 1..123: note = Synthetic Construct
QVQLVQSGAEVKKPGSSVKVSCKASGYAFSSSWMNWVRQAPGQGLEWIGRIYPGDGDTNYNGEFRVRATLTADTSTTTAYMELSSLRSEDTAVYFCARLLRNQPGESYAMDYWGQGTLVTVSS

SEQ ID NO: 1790 - protein, 123 aa, synthetic construct
  REGION 1..123: note = Description of Artificial Sequence: Synthetic polypeptide
  REGION 1..123: note = Synthetic Construct
QVQLVQSGAEVKKPGSSVKVSCKASGYAFSSSWMNWVRQAPGQGLEWIGRIYPGDGDTNYAQKFQGRATLTADTSTTTAYMELSSLRSEDTAVYFCARLLRNQPGESYAMDYWGQGTLVTVSS

SEQ ID NO: 1791 - protein, 123 aa, synthetic construct
  REGION 1..123: note = Description of Artificial Sequence: Synthetic polypeptide
  REGION 1..123: note = Synthetic Construct
QVQLVQSGAEVKKPGSSVKVSCKASGYAFSSSWMNWVRQAPGQGLEWIGRIYPGDGDTNYAQKFQGRATITADTSTSTAYMELSSLRSEDTAVYFCARLLRNQPGESYAMDYWGQGTLVTVSS

SEQ ID NO: 1792 - protein, 123 aa, synthetic construct
  REGION 1..123: note = Description of Artificial Sequence: Synthetic polypeptide
  REGION 1..123: note = Synthetic Construct
EVQLLESGGGLVQPGGSLRLSCAASGYAFSSSWMNWVRQAPGKGLEWIGRIYPGDGDTNYAQKFQGRATISADTSKNTAYLQMNSLRAEDTAVYYCARLLRNQPGESYAMDYWGQGTLVTVSS

SEQ ID NO: 1793 - protein, 123 aa, synthetic construct
  REGION 1..123: note = Description of Artificial Sequence: Synthetic polypeptide
  REGION 1..123: note = Synthetic Construct
QVQLVQSGAEVKKPGASVKVSCKASGYAFSSSWMNWVRQAPGQRLEWMGRIYPGDGDTNYAQKFQGRVTITRDTSASTAYMELSSLRSEDTAVYYCARLLRNQPGESYAMDYWGQGTLVTVSS

SEQ ID NO: 1794 - protein, 123 aa, synthetic construct
  REGION 1..123: note = Description of Artificial Sequence: Synthetic polypeptide
  REGION 1..123: note = Synthetic Construct
QVQLVQSGAEVKKPGASLKVSCKASGYAFSSSWMNWVRQAPGQRLEWIGRIYPGDGDTNYNGEFRVRATLTADTSASTAYMELSSLRSEDTAVYFCARLLRNQPGESYAMDYWGQGTLVTVSS

SEQ ID NO: 1795 - protein, 123 aa, synthetic construct
  REGION 1..123: note = Description of Artificial Sequence: Synthetic polypeptide
  REGION 1..123: note = Synthetic Construct
QVQLVQSGAEVKKPGASLKVSCKASGYAFSSSWMNWVRQAPGQRLEWIGRIYPGDGDTNYAQKFQGRATLTADTSASTAYMELSSLRSEDTAVYFCARLLRNQPGESYAMDYWGQGTLVTVSS

SEQ ID NO: 1796 - protein, 123 aa, synthetic construct
  REGION 1..123: note = Description of Artificial Sequence: Synthetic polypeptide
  REGION 1..123: note = Synthetic Construct
QVQLVQSGAEVKKPGASVKVSCKASGYAFSSSWMNWVRQAPGQGLEWMGRIYPGDGDTNYNGEFRVRVTMTRDTSTSTVYMELSSLRSEDTAVYYCARLLRNQPGESYAMDYWGQGTLVTVSS

SEQ ID NO: 1797 - protein, 123 aa, synthetic construct
  REGION 1..123: note = Description of Artificial Sequence: Synthetic polypeptide
  REGION 1..123: note = Synthetic Construct
QVQLVQSGAEVKKPGASVKVSCKASGYAFSSSWMNWVRQAPGQRLEWIGRIYPGDGDTNYAQKFQGRATITADTSASTAYMELSSLRSEDTAVYFCARLLRNQPGESYAMDYWGQGTLVTVSS

SEQ ID NO: 1798 - protein, 123 aa, synthetic construct
  REGION 1..123: note = Description of Artificial Sequence: Synthetic polypeptide
  REGION 1..123: note = Synthetic Construct
QVQLVQSGAEVKKPGSSVKVSCKASGYAFSSHWMNWVRQAPGQGLEWMGRIYPGEGQTNYAQKRQGRVTITADESTSTAYMELSSLRSEDTAVYYCARLLRNQPGESYAMDYWGQGTLVTVSS

SEQ ID NO: 1799 - protein, 112 aa, synthetic construct; identical to SEQ ID NO: 1664
  REGION 1..112: note = Description of Artificial Sequence: Synthetic polypeptide
  REGION 1..112: note = Synthetic Construct

SEQ ID NO: 1800 - protein, 112 aa, synthetic construct
  REGION 1..112: note = Description of Artificial Sequence: Synthetic polypeptide
  REGION 1..112: note = Synthetic Construct
DVVMTQTPLSLSVTPGQPASISCRSSQSLVHSNRYTYLHWYLQKPGQSPQLLIYKVSNRFSGVPDRFSGSGSGTDFTLKISRVEAEDVGVYYCSQSTRVPYTFGQGTKLEIK

SEQ ID NO: 1801 - protein, 112 aa, synthetic construct
  REGION 1..112: note = Description of Artificial Sequence: Synthetic polypeptide
  REGION 1..112: note = Synthetic Construct
DVVMTQTPLSLSVTPGQPASISCRSSQSLVHSNWYTYLHWYLQKPGQSPQLLIYKVSNRFSGVPDRFSGSGSGTDFTLKISRVEAEDVGVYYCSQSTRVPYTFGQGTKLEIK

SEQ ID NO: 1802 - protein, 112 aa, synthetic construct
  REGION 1..112: note = Description of Artificial Sequence: Synthetic polypeptide
  REGION 1..112: note = Synthetic Construct
GVVMTQTPLSLSVTPGQPASISCRSSQSLIHSNGYTYLHWYLQKPGQSPQLLIYKVSNRRSGVPDRFSGSGSGTDFTLKISRVEAEDVGVYYCSQSTRVPYTFGQGTKLEIK

SEQ ID NO: 1803 - protein, 112 aa, synthetic construct
  REGION 1..112: note = Description of Artificial Sequence: Synthetic polypeptide
  REGION 1..112: note = Synthetic Construct
GVVMTQTPLSLSVTPGQPASISCRTSQSLVHSNGYTYLHWYLQKPGQSPQLLIYKVSNRVSGVPDRFSGSGSGTDFTLKISRVEAEDVGVYYCSQSTRVPYTFGQGTKLEIK

SEQ ID NO: 1804 - protein, 112 aa, synthetic construct
  REGION 1..112: note = Description of Artificial Sequence: Synthetic polypeptide
  REGION 1..112: note = Synthetic Construct
GVVMTQTPLSLSVTPGQPASISCRSSQSLVHSNGYTYLHWYLQKPGQSPQLLIYKVSNRRSGVPDRFSGSGSGTDFTLKISRVEAEDVGVYYCSQSTRVPYTFGQGTKLEIK

SEQ ID NO: 1805 - protein, 112 aa, synthetic construct
  REGION 1..112: note = Description of Artificial Sequence: Synthetic polypeptide
  REGION 1..112: note = Synthetic Construct
DVVMTQTPLSLSVTPGQPASISCRSSRSLVHSNGYTYLHWYLQKPGQSPQLLIYKVSNRVSGVPDRFSGSGSGTDFTLKISRVEAEDVGVYYCSQSTRVPYTFGQGTKLEIK

SEQ ID NO: 1806 - protein, 112 aa, synthetic construct
  REGION 1..112: note = Description of Artificial Sequence: Synthetic polypeptide
  REGION 1..112: note = Synthetic Construct
GVVMTQTPLSLSVTPGQPASISCRSSRSLVHSNGYTYLHWYLQKPGQSPQLLIYKVSNRFSGVPDRFSGSGSGTDFTLKISRVEAEDVGVYYCSQSTRVPYTFGQGTKLEIK

SEQ ID NO: 1807 - protein, 112 aa, synthetic construct
  REGION 1..112: note = Description of Artificial Sequence: Synthetic polypeptide
  REGION 1..112: note = Synthetic Construct
GVVMTQTPLSLSVTPGQPASISCRSSSSLVHSNGYTYLHWYLQKPGQSPQLLIYKVSNRKSGVPDRFSGSGSGTDFTLKISRVEAEDVGVYYCSQSTRVPYTFGQGTKLEIK

SEQ ID NO: 1808 - protein, 112 aa, synthetic construct
  REGION 1..112: note = Description of Artificial Sequence: Synthetic polypeptide
  REGION 1..112: note = Synthetic Construct
GVVMTQTPLSLSVTPGQPASISCRSSRSLVHSNGYTYLHWYLQKPGQSPQLLIYKVSNRRSGVPDRFSGSGSGTDFTLKISRVEAEDVGVYYCSQSTRVPYTFGQGTKLEIK

SEQ ID NO: 1809 - protein, 112 aa, synthetic construct
  REGION 1..112: note = Description of Artificial Sequence: Synthetic polypeptide
  REGION 1..112: note = Synthetic Construct
GVVMTQTPLSLSVTPGQPASISCRSSRSLVHSNGYTYLHWYLQKPGQSPQLLIYKVSNRVSGVPDRFSGSGSGTDFTLKISRVEAEDVGVYYCSQSTRVPYTFGQGTKLEIK

SEQ ID NO: 1810 - protein, 112 aa, synthetic construct
  REGION 1..112: note = Description of Artificial Sequence: Synthetic polypeptide
  REGION 1..112: note = Synthetic Construct
GVVMAQTPLSLSVTPGQPASISCRTSQSLVHSNGYTYLHWYLQKPGQSPQLLIYKVSNRVSGVPDRFSGSGSGTDFTLKISRVEAEDVGVYYCSQSTRVPYTFGQGTKLEIK

SEQ ID NO: 1811 - protein, 112 aa, synthetic construct
  REGION 1..112: note = Description of Artificial Sequence: Synthetic polypeptide
  REGION 1..112: note = Synthetic Construct
DVVMTQSPDSLAVSLGERATINCRSSQSLVHSNGYTYLHWYQQKPGQSPKLLIYKVSNRFSGVPDRFSGSGSGTDFTLTISSLQAEDVAVYYCSQSTRVPYTFGGGTKVEIK

SEQ ID NO: 1812 - protein, 112 aa, synthetic construct
  REGION 1..112: note = Description of Artificial Sequence: Synthetic polypeptide
  REGION 1..112: note = Synthetic Construct
GVVMTQTPLSLSVTPGQPASISCRSSRSLVHSNRYTYLHWYLQKPGQSPQLLIYKVSNRRSGVPDRFSGSGSGTDFTLKISRVEAEDVGVYYCSQSTRVPYTFGQGTKLEIK

SEQ ID NO: 1813 - protein, 112 aa, synthetic construct
  REGION 1..112: note = Description of Artificial Sequence: Synthetic polypeptide
  REGION 1..112: note = Synthetic Construct
GVVMTQTPLSLSVTPGQPASISCRSSRSLVHSNQYTYLHWYLQKPGQSPQLLIYKVSNRRSGVPDRFSGSGSGTDFTLKISRVEAEDVGVYYCSQSTRVPYTFGQGTKLEIK

SEQ ID NO: 1814 - protein, 112 aa, synthetic construct
  REGION 1..112: note = Description of Artificial Sequence: Synthetic polypeptide
  REGION 1..112: note = Synthetic Construct
GVVMTQTPLSLSVTPGQPASISCRTSRSLVHSNRYTYLHWYLQKPGQSPQLLIYKVSNRRSGVPDRFSGSGSGTDFTLKISRVEAEDVGVYYCSQSTRVPYTFGQGTKLEIK

SEQ ID NO: 1815 - protein, 112 aa, synthetic construct
  REGION 1..112: note = Description of Artificial Sequence: Synthetic polypeptide
  REGION 1..112: note = Synthetic Construct
DVVMTQTPLSLSVTPGQPASISCRTSQSLVHSNAYTYLHWYLQKPGQSPQLLIYKVSNRVSGVPDRFSGSGSGTDFTLKISRVEAEDVGVYYCSQSTRVPYTFGQGTKLEIK

SEQ ID NO: 1816 - protein, 112 aa, synthetic construct
  REGION 1..112: note = Description of Artificial Sequence: Synthetic polypeptide
  REGION 1..112: note = Synthetic Construct
DVVMTQTPLSLSVTPGQPASISCRTSQSLVHSNQYTYLHWYLQKPGQSPQLLIYKVSNRVSGVPDRFSGSGSGTDFTLKISRVEAEDVGVYYCSQSTRVPYTFGQGTKLEIK

SEQ ID NO: 1817 - protein, 112 aa, synthetic construct
  REGION 1..112: note = Description of Artificial Sequence: Synthetic polypeptide
  REGION 1..112: note = Synthetic Construct
GVVMTQTPLSLSVTPGQPASISCRSSQSLVHSNQYTYLHWYLQKPGQSPQLLIYKVSNRRSGVPDRFSGSGSGTDFTLKISRVEAEDVGVYYCSQSTRVPYTFGQGTKLEIK

SEQ ID NO: 1818 - protein, 112 aa, synthetic construct
  REGION 1..112: note = Description of Artificial Sequence: Synthetic polypeptide
  REGION 1..112: note = Synthetic Construct
DVVMTQSPDSLAVSLGERATINCRSSQSLVHSNQYTYLHWYQQKPGQSPKLLIYKVSNRFSGVPDRFSGSGSGTDFTLTISSLQAEDVAVYYCSQSTRVPYTFGGGTKVEIK

SEQ ID NO: 1819 - protein, 112 aa, synthetic construct
  REGION 1..112: note = Description of Artificial Sequence: Synthetic polypeptide
  REGION 1..112: note = Synthetic Construct
DVVMTQSPDSLAVSLGERATINCRSSQSLVHSNRYTYLHWYQQKPGQSPKLLIYKVSNRFSGVPDRFSGSGSGTDFTLKISRVEAEDVGVYYCSQSTRVPYTFGQGTKLEIK

SEQ ID NO: 1820 - protein, 112 aa, synthetic construct
  REGION 1..112: note = Description of Artificial Sequence: Synthetic polypeptide
  REGION 1..112: note = Synthetic Construct
GVVMTQTPLSLSVTPGQPASISCRSSQSLVHSNRYTYLHWYLQKPGQSPQLLIYKVSNRRSGVPDRFSGSGSGTDFTLKISRVEAEDVGVYYCSQSTRVPYTFGQGTKLEIK

SEQ ID NO: 1821 - protein, 112 aa, synthetic construct; identical to SEQ ID NO: 1663
  REGION 1..112: note = Description of Artificial Sequence: Synthetic polypeptide
  REGION 1..112: note = Synthetic Construct

SEQ ID NO: 1822 - protein, 112 aa, synthetic construct
  REGION 1..112: note = Description of Artificial Sequence: Synthetic polypeptide
  REGION 1..112: note = Synthetic Construct
DVVMTQTPLSLSVTPGQPASISCRSSQSLVHSNGYTYLHWYLQKPGQSPQLLIYKVSNRFSGVPDRFSGSGSGTDFTLKISRVEAEDLGVYFCSQSTRVPYTFGQGTKLEIK

SEQ ID NO: 1823 - protein, 112 aa, synthetic construct
  REGION 1..112: note = Description of Artificial Sequence: Synthetic polypeptide
  REGION 1..112: note = Synthetic Construct
DIVMTQSPLSLPVTPGEPASISCRSSQSLVHSNGYTYLHWYLQKPGQSPQLLIYKVSNRFSGVPDRFSGSGSGTDFTLKISRVEAEDVGVYYCSQSTRVPYTFGGGTKVEIK

SEQ ID NO: 1824 - protein, 112 aa, synthetic construct
  REGION 1..112: note = Description of Artificial Sequence: Synthetic polypeptide
  REGION 1..112: note = Synthetic Construct
DVQMTQSPSSLSASVGDRVTITCRSSQSLVHSNGYTYLHWYQQKPGKSPKLLIYKVSNRFSGVPSRFSGSGSGTDFTLTISSLQPEDFATYYCSQSTRVPYTFGGGTKVEIK

SEQ ID NO: 1825 - protein, 112 aa, synthetic construct
  REGION 1..112: note = Description of Artificial Sequence: Synthetic polypeptide
  REGION 1..112: note = Synthetic Construct
GVVMTQTPLSLSVTPGQPASISCRTSQSLVHSNQYTYLHWYLQKPGQSPQLLIYKVSNRVSGVPDRFSGSGSGTDFTLKISRVEAEDVGVYYCSQSTRVPYTFGQGTKLEIK

SEQ ID NO: 1826 - protein, 123 aa, synthetic construct; identical to SEQ ID NO: 1341
  REGION 1..123: note = Description of Artificial Sequence: Synthetic polypeptide
  REGION 1..123: note = Synthetic Construct

SEQ ID NO: 1827 - protein, 112 aa, synthetic construct; identical to SEQ ID NO: 1670
  REGION 1..112: note = Description of Artificial Sequence: Synthetic polypeptide
  REGION 1..112: note = Synthetic Construct

SEQ ID NO: 1828 - protein, 9 aa, synthetic construct
  REGION 1..9: note = Description of Artificial Sequence: Synthetic peptide
  REGION 1..9: note = Synthetic Construct
  VARIANT 4: note = Ser or Trp
  VARIANT 5: note = Ser, Leu, or Arg
  VARIANT 6: note = Ser, Asp, His, Gln, or Glu
YAFXXXWMN

SEQ ID NO: 1829 - protein, 17 aa, synthetic construct
  REGION 1..17: note = Description of Artificial Sequence: Synthetic peptide
  REGION 1..17: note = Synthetic Construct
  VARIANT 6: note = Asp, Gly, Glu, Gln, or Val
  VARIANT 8: note = Asp or Gln
  VARIANT 13: note = Gln, Arg, His, Trp, Tyr, or Gly
  VARIANT 15: note = Phe, Arg, or Trp
  VARIANT 16: note = Gln, Arg, Lys, or His
RIYPGXGXTNYAXKXXG

SEQ ID NO: 1830 - protein, 16 aa, synthetic construct
  REGION 1..16: note = Description of Artificial Sequence: Synthetic peptide
  REGION 1..16: note = Synthetic Construct
  VARIANT 7: note = Gln or Lys
  VARIANT 10: note = Glu, Ser, or Ala
  VARIANT 14: note = Met or His
ARLLRNXPGXSYAXDY

SEQ ID NO: 1831 - protein, 9 aa, synthetic construct
  REGION 1..9: note = Description of Artificial Sequence: Synthetic peptide
  REGION 1..9: note = Synthetic Construct
YAFSSSWMN

SEQ ID NO: 1832 - protein, 17 aa, synthetic construct
  REGION 1..17: note = Description of Artificial Sequence: Synthetic peptide
  REGION 1..17: note = Synthetic Construct
RIYPGDGDTNYAQKFQG

SEQ ID NO: 1833 - protein, 16 aa, synthetic construct
  REGION 1..16: note = Description of Artificial Sequence: Synthetic peptide
  REGION 1..16: note = Synthetic Construct
ARLLRNQPGESYAMDY

SEQ ID NO: 1834 - protein, 16 aa, synthetic construct
  REGION 1..16: note = Description of Artificial Sequence: Synthetic peptide
  REGION 1..16: note = Synthetic Construct
  VARIANT 2: note = Ser or Thr
  VARIANT 4: note = Gln, Arg, or Ser
  VARIANT 7: note = Val or Ile
  VARIANT 11: note = Gly, Arg, Trp, Gln, or Ala
RXSXSLXHSNXYTYLH

SEQ ID NO: 1835 - protein, 7 aa, synthetic construct
  REGION 1..7: note = Description of Artificial Sequence: Synthetic peptide
  REGION 1..7: note = Synthetic Construct
  VARIANT 6: note = Phe, Arg, Val, or Lys
KVSNRXS

SEQ ID NO: 1836 - protein, 9 aa, synthetic construct
  REGION 1..9: note = Description of Artificial Sequence: Synthetic peptide
  REGION 1..9: note = Synthetic Construct
SQSTRVPYT

SEQ ID NO: 1837 - protein, 16 aa, synthetic construct
  REGION 1..16: note = Description of Artificial Sequence: Synthetic peptide
  REGION 1..16: note = Synthetic Construct
RSSQSLVHSNGYTYLH

SEQ ID NO: 1838 - protein, 7 aa, synthetic construct
  REGION 1..7: note = Description of Artificial Sequence: Synthetic peptide
  REGION 1..7: note = Synthetic Construct
KVSNRFS

SEQ ID NO: 1839 - protein, 9 aa, synthetic construct
  REGION 1..9: note = Description of Artificial Sequence: Synthetic peptide
  REGION 1..9: note = Synthetic Construct
YAFSSQWMN

SEQ ID NO: 1840 - protein, 17 aa, synthetic construct
  REGION 1..17: note = Description of Artificial Sequence: Synthetic peptide
  REGION 1..17: note = Synthetic Construct
RIYPGGGDTNYARKFQG

SEQ ID NO: 1841 - protein, 7 aa, synthetic construct
  REGION 1..7: note = Description of Artificial Sequence: Synthetic peptide
  REGION 1..7: note = Synthetic Construct
KVSNRRS

SEQ ID NO: 1842 - protein, 17 aa, synthetic construct
  REGION 1..17: note = Description of Artificial Sequence: Synthetic peptide
  REGION 1..17: note = Synthetic Construct
RIYPGGGDTNYAGKFQG

SEQ ID NO: 1843 - protein, 9 aa, synthetic construct
  REGION 1..9: note = Description of Artificial Sequence: Synthetic peptide
  REGION 1..9: note = Synthetic Construct
YAFSSDWMN

SEQ ID NO: 1844 - protein, 17 aa, synthetic construct
  REGION 1..17: note = Description of Artificial Sequence: Synthetic peptide
  REGION 1..17: note = Synthetic Construct
RIYPGEGDTNYARKFHG

SEQ ID NO: 1845 - protein, 16 aa, synthetic construct
  REGION 1..16: note = Description of Artificial Sequence: Synthetic peptide
  REGION 1..16: note = Synthetic Construct
ARLLRNKPGESYAMDY

SEQ ID NO: 1846 - protein, 16 aa, synthetic construct
  REGION 1..16: note = Description of Artificial Sequence: Synthetic peptide
  REGION 1..16: note = Synthetic Construct
RTSQSLVHSNAYTYLH

SEQ ID NO: 1847 - protein, 7 aa, synthetic construct
  REGION 1..7: note = Description of Artificial Sequence: Synthetic peptide
  REGION 1..7: note = Synthetic Construct
KVSNRVS

SEQ ID NO: 1848 - protein, 17 aa, synthetic construct
  REGION 1..17: note = Description of Artificial Sequence: Synthetic peptide
  REGION 1..17: note = Synthetic Construct
RIYPGEGDTNYARKFQG

SEQ ID NO: 1849 - protein, 16 aa, synthetic construct
  REGION 1..16: note = Description of Artificial Sequence: Synthetic peptide
  REGION 1..16: note = Synthetic Construct
RSSQSLVHSNQYTYLH

SEQ ID NO: 1850 - protein, 17 aa, synthetic construct
  REGION 1..17: note = Description of Artificial Sequence: Synthetic peptide
  REGION 1..17: note = Synthetic Construct
RIYPGEGDTNYAGKFQG

SEQ ID NO: 1851 - protein, 16 aa, synthetic construct
  REGION 1..16: note = Description of Artificial Sequence: Synthetic peptide
  REGION 1..16: note = Synthetic Construct
RSSQSLVHSNRYTYLH

SEQ ID NO: 1852 - protein, 110 aa, Homo sapiens; identical to SEQ ID NO: 207

SEQ ID NO: 1853 - protein, 330 aa, Homo sapiens [sequence omitted]

SEQ ID NO: 1854 - protein, 330 aa, synthetic construct
  REGION 1..330: note = Description of Artificial Sequence: Synthetic polypeptide
  REGION 1..330: note = Synthetic Construct
ASTKGPSVFPLAPSSKSTSGGTAALGCLVKDYFPEPVTVSWNSGALTSGVHTFPAVLQSSGLYSLSSVVTVPSSSLGTQTYICNVNHKPSNTKVDKKVEPKSCDKTHTCPPCPAPELLGGPSVFLFPPKPKDTLMISRTPEVTCVVVDVSHEDPEVKFNWYVDGVEVHNAKTKPREEQYNSTYRVVSVLTVLHQDWLNGKEYKCKVSNKALPAPIEKTISKAKGQPREPQVYTLPPSRDELTKNQVSLTCLVKGFYPSDIAVEWESNGQPENNYKTTPPVLDSDGSFFLYSKLTVDKSRWQQGNVFSCSVMHGALHNHYTQKSLSLSPGK

SEQ ID NO: 1855 - protein, 330 aa, synthetic construct
  REGION 1..330: note = Description of Artificial Sequence: Synthetic polypeptide
  REGION 1..330: note = Synthetic Construct
ASTKGPSVFPLAPSSKSTSGGTAALGCLVKDYFPEPVTVSWNSGALTSGVHTFPAVLQSSGLYSLSSVVTVPSSSLGTQTYICNVNHKPSNTKVDKKVEPKSCDKTHTCPPCPAPEAAGGPSVFLFPPKPKDTLMISRTPEVTCVVVDVSHEDPEVKFNWYVDGVEVHNAKTKPREEQYNSTYRVVSVLTVLHQDWLNGKEYKCKVSNKALPASIEKTISKAKGQPREPQVYTLPPSRDELTKNQVSLTCLVKGFYPSDIAVEWESNGQPENNYKTTPPVLDSDGSFFLYSKLTVDKSRWQQGNVFSCSVMHEALHNHYTQKSLSLSPGK

SEQ ID NO: 1856 - protein, 330 aa, synthetic construct
  REGION 1..330: note = Description of Artificial Sequence: Synthetic polypeptide
  REGION 1..330: note = Synthetic Construct
ASTKGPSVFPLAPSSKSTSGGTAALGCLVKDYFPEPVTVSWNSGALTSGVHTFPAVLQSSGLYSLSSVVTVPSSSLGTQTYICNVNHKPSNTKVDKKVEPKSCDKTHTCPPCPAPEAAGGPSVFLFPPKPKDTLMISRTPEVTCVVVDVSHEDPEVKFNWYVDGVEVHNAKTKPREEQYNSTYRVVSVLTVLHQDWLNGKEYKCKVSNKALPASIEKTISKAKGQPREPQVYTLPPSRDELTKNQVSLTCLVKGFYPSDIAVEWESNGQPENNYKTTPPVLDSDGSFFLYSKLTVDKSRWQQGNVFSCSVMHGALHNHYTQKSLSLSPGK

SEQ ID NO: 1857 - protein, 330 aa, synthetic construct
  REGION 1..330: note = Description of Artificial Sequence: Synthetic polypeptide
  REGION 1..330: note = Synthetic Construct
ASTKGPSVFPLAPSSKSTSGGTAALGCLVKDYFPEPVTVSWNSGALTSGVHTFPAVLQSSGLYSLSSVVTVPSSSLGTQTYICNVNHKPSNTKVDKKVEPKSCDKTHTCPPCPAPELLGGPSVFLFPPKPKDTLMISRTPEVTCVVVDVSHEDPEVKFNWYVDGVEVHNAKTKPREEQYNSTYRVVSVLTVLHQDWLNGKEYKCAVSNKALPAPIEKTISKAKGQPREPQVYTLPPSRDELTKNQVSLTCLVKGFYPSDIAVEWESNGQPENNYKTTPPVLDSDGSFFLYSKLTVDKSRWQQGNVFSCSVMHGALHNHYTQKSLSLSPGK

SEQ ID NO: 1858 - protein, 330 aa, synthetic construct
  REGION 1..330: note = Description of Artificial Sequence: Synthetic polypeptide
  REGION 1..330: note = Synthetic Construct
ASTKGPSVFPLAPSSKSTSGGTAALGCLVKDYFPEPVTVSWNSGALTSGVHTFPAVLQSSGLYSLSSVVTVPSSSLGTQTYICNVNHKPSNTKVDKKVEPKSCDKTHTCPPCPAPELLGGPSVFLFPPKPKDTLMISRTPEVTCVVVDVSHEDPEVKFNWYVDGVEVHNAKTKPREEQYNSTYRVVSVLTVLHQDWLNGKEYKCKVSNKALPASIEKTISKAKGQPREPQVYTLPPSRDELTKNQVSLTCLVKGFYPSDIAVEWESNGQPENNYKTTPPVLDSDGSFFLYSKLTVDKSRWQQGNVFSCSVMHGALHNHYTQKSLSLSPGK

SEQ ID NO: 1859 - protein, 330 aa, synthetic construct
  REGION 1..330: note = Description of Artificial Sequence: Synthetic polypeptide
  REGION 1..330: note = Synthetic Construct
ASTKGPSVFPLAPSSKSTSGGTAALGCLVKDYFPEPVTVSWNSGALTSGVHTFPAVLQSSGLYSLSSVVTVPSSSLGTQTYICNVNHKPSNTKVDKKVEPKSCDKTHTCPPCPAPELLGGPSVFLFPPKPKDTLMISRTPEVTCVVVDVSHEDPEVKFNWYVDGVEVHNAKTKPREEQYNSTYRVVSVLTVLHQDWLNGKEYKCKVSNKALPSSIEKTISKAKGQPREPQVYTLPPSRDELTKNQVSLTCLVKGFYPSDIAVEWESNGQPENNYKTTPPVLDSDGSFFLYSKLTVDKSRWQQGNVFSCSVMHGALHNHYTQKSLSLSPGK

SEQ ID NO: 1860 - protein, 330 aa, synthetic construct
  REGION 1..330: note = Description of Artificial Sequence: Synthetic polypeptide
  REGION 1..330: note = Synthetic Construct
ASTKGPSVFPLAPSSKSTSGGTAALGCLVKDYFPEPVTVSWNSGALTSGVHTFPAVLQSSGLYSLSSVVTVPSSSLGTQTYICNVNHKPSNTKVDKKVEPKSCDKTHTCPPCPAPELLGGPSVFLFPPKPKDTLMISRTPEVTCVVVDVSHEDPEVKFNWYVDGVEVHNAKTKPREEQYNSTYRVVSVLTVLHQDWLNGKEYKCAVSNKALPASIEKTISKAKGQPREPQVYTLPPSRDELTKNQVSLTCLVKGFYPSDIAVEWESNGQPENNYKTTPPVLDSDGSFFLYSKLTVDKSRWQQGNVFSCSVMHGALHNHYTQKSLSLSPGK

SEQ ID NO: 1861 - protein, 326 aa, Homo sapiens; identical to SEQ ID NO: 204

SEQ ID NO: 1862 - protein, 326 aa, synthetic construct
  REGION 1..326: note = Description of Artificial Sequence: Synthetic polypeptide
  REGION 1..326: note = Synthetic Construct
ASTKGPSVFPLAPCSRSTSESTAALGCLVKDYFPEPVTVSWNSGALTSGVHTFPAVLQSSGLYSLSSVVTVPSSNFGTQTYTCNVDHKPSNTKVDKTVERKCCVECPPCPAPPVAGPSVFLFPPKPKDTLMISRTPEVTCVVVDVSHEDPEVQFNWYVDGVEVHNAKTKPREEQFNSTFRVVSVLTVVHQDWLNGKEYKCKVSNKGLPAPIEKTISKTKGQPREPQVYTLPPSREEMTKNQVSLTCLVKGFYPSDIAVEWESNGQPENNYKTTPPMLDSDGSFFLYSKLTVDKSRWQQGNVFSCSVMHGALHNHYTQKSLSLSPGK

SEQ ID NO: 1863 - protein, 326 aa, synthetic construct
  REGION 1..326: note = Description of Artificial Sequence: Synthetic polypeptide
  REGION 1..326: note = Synthetic Construct
ASTKGPSVFPLAPCSRSTSESTAALGCLVKDYFPEPVTVSWNSGALTSGVHTFPAVLQSSGLYSLSSVVTVPSSNFGTQTYTCNVDHKPSNTKVDKTVERKCCVECPPCPAPPVAGPSVFLFPPKPKDTLMISRTPEVTCVVVDVSHEDPEVQFNWYVDGVEVHNAKTKPREEQFNSTFRVVSVLTVVHQDWLNGKEYKCKVSNKGLPSSIEKTISKTKGQPREPQVYTLPPSREEMTKNQVSLTCLVKGFYPSDIAVEWESNGQPENNYKTTPPMLDSDGSFFLYSKLTVDKSRWQQGNVFSCSVMHGALHNHYTQKSLSLSPGK

SEQ ID NO: 1864 - protein, 9 aa, synthetic construct
  REGION 1..9: note = Description of Artificial Sequence: Synthetic peptide
  REGION 1..9: note = Synthetic Construct
YAFSLSWMN

SEQ ID NO: 1865 - protein, 9 aa, synthetic construct
  REGION 1..9: note = Description of Artificial Sequence: Synthetic peptide
  REGION 1..9: note = Synthetic Construct
YAFSRSWMN

SEQ ID NO: 1866 - protein, 9 aa, synthetic construct
  REGION 1..9: note = Description of Artificial Sequence: Synthetic peptide
  REGION 1..9: note = Synthetic Construct
YAFSSHWMN

SEQ ID NO: 1867 - protein, 9 aa, synthetic construct
  REGION 1..9: note = Description of Artificial Sequence: Synthetic peptide
  REGION 1..9: note = Synthetic Construct
YAFSSEWMN

SEQ ID NO: 1868 - protein, 9 aa, synthetic construct
  REGION 1..9: note = Description of Artificial Sequence: Synthetic peptide
  REGION 1..9: note = Synthetic Construct
YAFWSSWMN

SEQ ID NO: 1869 - protein, 17 aa, synthetic construct
  REGION 1..17: note = Description of Artificial Sequence: Synthetic peptide
  REGION 1..17: note = Synthetic Construct
RIYPGGGDTNYAQKFQG

SEQ ID NO: 1870 - protein, 17 aa, synthetic construct
  REGION 1..17: note = Description of Artificial Sequence: Synthetic peptide
  REGION 1..17: note = Synthetic Construct
RIYPGEGDTNYAQKFQG

SEQ ID NO: 1871 - protein, 17 aa, synthetic construct
  REGION 1..17: note = Description of Artificial Sequence: Synthetic peptide
  REGION 1..17: note = Synthetic Construct
RIYPGQGDTNYAQKFQG

SEQ ID NO: 1872 - protein, 17 aa, synthetic construct
  REGION 1..17: note = Description of Artificial Sequence: Synthetic peptide
  REGION 1..17: note = Synthetic Construct
RIYPGDGDTNYAQKFRG

SEQ ID NO: 1873 - protein, 17 aa, synthetic construct
  REGION 1..17: note = Description of Artificial Sequence: Synthetic peptide
  REGION 1..17: note = Synthetic Construct
RIYPGDGDTNYARKFQG

SEQ ID NO: 1874 - protein, 17 aa, synthetic construct
  REGION 1..17: note = Description of Artificial Sequence: Synthetic peptide
  REGION 1..17: note = Synthetic Construct
RIYPGDGDTNYAHKFQG

SEQ ID NO: 1875 - protein, 17 aa, synthetic construct
  REGION 1..17: note = Description of Artificial Sequence: Synthetic peptide
  REGION 1..17: note = Synthetic Construct
RIYPGDGDTNYAQKFKG

SEQ ID NO: 1876 - protein, 17 aa, synthetic construct
  REGION 1..17: note = Description of Artificial Sequence: Synthetic peptide
  REGION 1..17: note = Synthetic Construct
RIYPGDGDTNYAQKRQG

SEQ ID NO: 1877 - protein, 17 aa, synthetic construct
  REGION 1..17: note = Description of Artificial Sequence: Synthetic peptide
  REGION 1..17: note = Synthetic Construct
RIYPGDGDTNYAQKWQG

SEQ ID NO: 1878 - protein, 17 aa, synthetic construct
  REGION 1..17: note = Description of Artificial Sequence: Synthetic peptide
  REGION 1..17: note = Synthetic Construct
RIYPGDGDTNYAWKFQG

SEQ ID NO: 1879 - protein, 17 aa, synthetic construct
  REGION 1..17: note = Description of Artificial Sequence: Synthetic peptide
  REGION 1..17: note = Synthetic Construct
RIYPGDGDTNYAYKFQG

SEQ ID NO: 1880 - protein, 17 aa, synthetic construct
  REGION 1..17: note = Description of Artificial Sequence: Synthetic peptide
  REGION 1..17: note = Synthetic Construct
RIYPGDGQTNYAQKRQG

SEQ ID NO: 1881 - protein, 17 aa, synthetic construct
  REGION 1..17: note = Description of Artificial Sequence: Synthetic peptide
  REGION 1..17: note = Synthetic Construct
RIYPGGGDTNYAQKFRG

SEQ ID NO: 1882 - protein, 17 aa, synthetic construct
  REGION 1..17: note = Description of Artificial Sequence: Synthetic peptide
  REGION 1..17: note = Synthetic Construct
RIYPGGGDTNYAQKRQG

SEQ ID NO: 1883 - protein, 17 aa, synthetic construct
  REGION 1..17: note = Description of Artificial Sequence: Synthetic peptide
  REGION 1..17: note = Synthetic Construct
RIYPGVGDTNYAQKFQG

SEQ ID NO: 1884 - protein, 17 aa, synthetic construct
  REGION 1..17: note = Description of Artificial Sequence: Synthetic peptide
  REGION 1..17: note = Synthetic Construct
RIYPGEGDTNYAQKFRG

SEQ ID NO: 1885 - protein, 17 aa, synthetic construct
  REGION 1..17: note = Description of Artificial Sequence: Synthetic peptide
  REGION 1..17: note = Synthetic Construct
RIYPGGGDTNYARKFRG

SEQ ID NO: 1886 - protein, 17 aa, synthetic construct
  REGION 1..17: note = Description of Artificial Sequence: Synthetic peptide
  REGION 1..17: note = Synthetic Construct
RIYPGEGDTNYAQKFHG

SEQ ID NO: 1887 - protein, 17 aa, synthetic construct
  REGION 1..17: note = Description of Artificial Sequence: Synthetic peptide
  REGION 1..17: note = Synthetic Construct
RIYPGEGQTNYAQKRQG

SEQ ID NO: 1888 - protein, 16 aa, synthetic construct
  REGION 1..16: note = Description of Artificial Sequence: Synthetic peptide
  REGION 1..16: note = Synthetic Construct
ARLLRNQPGSSYAMDY

SEQ ID NO: 1889 - protein, 16 aa, synthetic construct
  REGION 1..16: note = Description of Artificial Sequence: Synthetic peptide
  REGION 1..16: note = Synthetic Construct
ARLLRNQPGASYAMDY

SEQ ID NO: 1890 - protein, 16 aa, synthetic construct
  REGION 1..16: note = Description of Artificial Sequence: Synthetic peptide
  REGION 1..16: note = Synthetic Construct
ARLLRNQPGESYAHDY

SEQ ID NO: 1891 - protein, 16 aa, synthetic construct
  REGION 1..16: note = Description of Artificial Sequence: Synthetic peptide
  REGION 1..16: note = Synthetic Construct
RSSQSLVHSNWYTYLH

SEQ ID NO: 1892 - protein, 16 aa, synthetic construct
  REGION 1..16: note = Description of Artificial Sequence: Synthetic peptide
  REGION 1..16: note = Synthetic Construct
RSSQSLIHSNGYTYLH

SEQ ID NO: 1893 - protein, 16 aa, synthetic construct
  REGION 1..16: note = Description of Artificial Sequence: Synthetic peptide
  REGION 1..16: note = Synthetic Construct
RTSQSLVHSNGYTYLH

SEQ ID NO: 1894 - protein, 16 aa, synthetic construct
  REGION 1..16: note = Description of Artificial Sequence: Synthetic peptide
  REGION 1..16: note = Synthetic Construct
RSSRSLVHSNGYTYLH

SEQ ID NO: 1895 - protein, 16 aa, synthetic construct
  REGION 1..16: note = Description of Artificial Sequence: Synthetic peptide
  REGION 1..16: note = Synthetic Construct
RSSSSLVHSNGYTYLH

SEQ ID NO: 1896 - protein, 16 aa, synthetic construct
  REGION 1..16: note = Description of Artificial Sequence: Synthetic peptide
  REGION 1..16: note = Synthetic Construct
RSSRSLVHSNRYTYLH

SEQ ID NO: 1897 - protein, 16 aa, synthetic construct
  REGION 1..16: note = Description of Artificial Sequence: Synthetic peptide
  REGION 1..16: note = Synthetic Construct
RSSRSLVHSNQYTYLH

SEQ ID NO: 1898 - protein, 16 aa, synthetic construct
  REGION 1..16: note = Description of Artificial Sequence: Synthetic peptide
  REGION 1..16: note = Synthetic Construct
RTSRSLVHSNRYTYLH

SEQ ID NO: 1899 - protein, 16 aa, synthetic construct
  REGION 1..16: note = Description of Artificial Sequence: Synthetic peptide
  REGION 1..16: note = Synthetic Construct
RTSQSLVHSNQYTYLH

SEQ ID NO: 1900 - protein, 7 aa, synthetic construct
  REGION 1..7: note = Description of Artificial Sequence: Synthetic peptide
  REGION 1..7: note = Synthetic Construct
KVSNRKS

SEQ ID NO: 1901 - protein, 5 aa, synthetic construct
  REGION 1..5: note = Description of Artificial Sequence: Synthetic peptide
  REGION 1..5: note = Synthetic Construct
SQWMN

SEQ ID NO: 1902 - protein, 14 aa, synthetic construct
  REGION 1..14: note = Description of Artificial Sequence: Synthetic peptide
  REGION 1..14: note = Synthetic Construct
LLRNQPGESYAMDY

SEQ ID NO: 1903 - protein, 5 aa, synthetic construct
  REGION 1..5: note = Description of Artificial Sequence: Synthetic peptide
  REGION 1..5: note = Synthetic Construct
SDWMN

SEQ ID NO: 1904 - protein, 14 aa, synthetic construct
  REGION 1..14: note = Description of Artificial Sequence: Synthetic peptide
  REGION 1..14: note = Synthetic Construct
LLRNKPGESYAMDY

SEQ ID NO: 1905 - protein, 453 aa, synthetic construct
  REGION 1..453: note = Description of Artificial Sequence: Synthetic polypeptide
  REGION 1..453: note = Synthetic Construct
QVQLVQSGAEVKKPGASVKVSCKASGYAFSSQWMNWVRQAPGQRLEWIGRIYPGGGDTNYAGKFQGRVTITADTSASTAYMELSSLRSEDTAVYYCARLLRNQPGESYAMDYWGQGTLVTVSSASTKGPSVFPLAPSSKSTSGGTAALGCLVKDYFPEPVTVSWNSGALTSGVHTFPAVLQSSGLYSLSSVVTVPSSSLGTQTYICNVNHKPSNTKVDKKVEPKSCDKTHTCPPCPAPELLGGPSVFLFPPKPKDTLMISRTPEVTCVVVDVSHEDPEVKFNWYVDGVEVHNAKTKPREEQYNSTYRVVSVLTVLHQDWLNGKEYKCKVSNKALPAPIEKTISKAKGQPREPQVYTLPPSRDELTKNQVSLTCLVKGFYPSDIAVEWESNGQPENNYKTTPPVLDSDGSFFLYSKLTVDKSRWQQGNVFSCSVMHEALHNHYTQKSLSLSPGK

SEQ ID NO: 1906 - protein, 452 aa, synthetic construct
  REGION 1..452: note = Description of Artificial Sequence: Synthetic polypeptide
  REGION 1..452: note = Synthetic Construct
QVQLVQSGAEVKKPGASVKVSCKASGYAFSSQWMNWVRQAPGQRLEWIGRIYPGGGDTNYAGKFQGRVTITADTSASTAYMELSSLRSEDTAVYYCARLLRNQPGESYAMDYWGQGTLVTVSSASTKGPSVFPLAPSSKSTSGGTAALGCLVKDYFPEPVTVSWNSGALTSGVHTFPAVLQSSGLYSLSSVVTVPSSSLGTQTYICNVNHKPSNTKVDKKVEPKSCDKTHTCPPCPAPELLGGPSVFLFPPKPKDTLMISRTPEVTCVVVDVSHEDPEVKFNWYVDGVEVHNAKTKPREEQYNSTYRVVSVLTVLHQDWLNGKEYKCKVSNKALPAPIEKTISKAKGQPREPQVYTLPPSRDELTKNQVSLTCLVKGFYPSDIAVEWESNGQPENNYKTTPPVLDSDGSFFLYSKLTVDKSRWQQGNVFSCSVMHEALHNHYTQKSLSLSPG

SEQ ID NO: 1907 - protein, 453 aa, synthetic construct
  REGION 1..453: note = Description of Artificial Sequence: Synthetic polypeptide
  REGION 1..453: note = Synthetic Construct
QVQLVQSGAEVKKPGASVKVSCKASGYAFSSQWMNWVRQAPGQRLEWIGRIYPGGGDTNYAGKFQGRVTITADTSASTAYMELSSLRSEDTAVYYCARLLRNQPGESYAMDYWGQGTLVTVSSASTKGPSVFPLAPSSKSTSGGTAALGCLVKDYFPEPVTVSWNSGALTSGVHTFPAVLQSSGLYSLSSVVTVPSSSLGTQTYICNVNHKPSNTKVDKKVEPKSCDKTHTCPPCPAPELLGGPSVFLFPPKPKDTLMISRTPEVTCVVVDVSHEDPEVKFNWYVDGVEVHNAKTKPREEQYNSTYRVVSVLTVLHQDWLNGKEYKCKVSNKALPASIEKTISKAKGQPREPQVYTLPPSRDELTKNQVSLTCLVKGFYPSDIAVEWESNGQPENNYKTTPPVLDSDGSFFLYSKLTVDKSRWQQGNVFSCSVMHGALHNHYTQKSLSLSPGK

SEQ ID NO: 1908 - protein, 452 aa, synthetic construct
  REGION 1..452: note = Description of Artificial Sequence: Synthetic polypeptide
  REGION 1..452: note = Synthetic Construct
QVQLVQSGAEVKKPGASVKVSCKASGYAFSSQWMNWVRQAPGQRLEWIGRIYPGGGDTNYAGKFQGRVTITADTSASTAYMELSSLRSEDTAVYYCARLLRNQPGESYAMDYWGQGTLVTVSSASTKGPSVFPLAPSSKSTSGGTAALGCLVKDYFPEPVTVSWNSGALTSGVHTFPAVLQSSGLYSLSSVVTVPSSSLGTQTYICNVNHKPSNTKVDKKVEPKSCDKTHTCPPCPAPELLGGPSVFLFPPKPKDTLMISRTPEVTCVVVDVSHEDPEVKFNWYVDGVEVHNAKTKPREEQYNSTYRVVSVLTVLHQDWLNGKEYKCKVSNKALPASIEKTISKAKGQPREPQVYTLPPSRDELTKNQVSLTCLVKGFYPSDIAVEWESNGQPENNYKTTPPVLDSDGSFFLYSKLTVDKSRWQQGNVFSCSVMHGALHNHYTQKSLSLSPG

SEQ ID NO: 1909 - protein, 453 aa, synthetic construct
  REGION 1..453: note = Description of Artificial Sequence: Synthetic polypeptide
  REGION 1..453: note = Synthetic Construct
QVQLVQSGAEVKKPGSSVKVSCKASGYAFSSDWMNWVRQAPGQGLEWMGRIYPGEGDTNYARKFHGRVTITADESTSTAYMELSSLRSEDTAVYYCARLLRNKPGESYAMDYWGQGTLVTVSSASTKGPSVFPLAPSSKSTSGGTAALGCLVKDYFPEPVTVSWNSGALTSGVHTFPAVLQSSGLYSLSSVVTVPSSSLGTQTYICNVNHKPSNTKVDKKVEPKSCDKTHTCPPCPAPELLGGPSVFLFPPKPKDTLMISRTPEVTCVVVDVSHEDPEVKFNWYVDGVEVHNAKTKPREEQYNSTYRVVSVLTVLHQDWLNGKEYKCKVSNKALPAPIEKTISKAKGQPREPQVYTLPPSRDELTKNQVSLTCLVKGFYPSDIAVEWESNGQPENNYKTTPPVLDSDGSFFLYSKLTVDKSRWQQGNVFSCSVMHEALHNHYTQKSLSLSPGK

SEQ ID NO: 1910 - protein, 452 aa, synthetic construct
  REGION 1..452: note = Description of Artificial Sequence: Synthetic polypeptide
  REGION 1..452: note = Synthetic Construct
QVQLVQSGAEVKKPGSSVKVSCKASGYAFSSDWMNWVRQAPGQGLEWMGRIYPGEGDTNYARKFHGRVTITADESTSTAYMELSSLRSEDTAVYYCARLLRNKPGESYAMDYWGQGTLVTVSSASTKGPSVFPLAPSSKSTSGGTAALGCLVKDYFPEPVTVSWNSGALTSGVHTFPAVLQSSGLYSLSSVVTVPSSSLGTQTYICNVNHKPSNTKVDKKVEPKSCDKTHTCPPCPAPELLGGPSVFLFPPKPKDTLMISRTPEVTCVVVDVSHEDPEVKFNWYVDGVEVHNAKTKPREEQYNSTYRVVSVLTVLHQDWLNGKEYKCKVSNKALPAPIEKTISKAKGQPREPQVYTLPPSRDELTKNQVSLTCLVKGFYPSDIAVEWESNGQPENNYKTTPPVLDSDGSFFLYSKLTVDKSRWQQGNVFSCSVMHEALHNHYTQKSLSLSPG

SEQ ID NO: 1911 - protein, 453 aa, synthetic construct
  REGION 1..453: note = Description of Artificial Sequence: Synthetic polypeptide
  REGION 1..453: note = Synthetic Construct
QVQLVQSGAEVKKPGSSVKVSCKASGYAFSSDWMNWVRQAPGQGLEWMGRIYPGEGDTNYARKFHGRVTITADESTSTAYMELSSLRSEDTAVYYCARLLRNKPGESYAMDYWGQGTLVTVSSASTKGPSVFPLAPSSKSTSGGTAALGCLVKDYFPEPVTVSWNSGALTSGVHTFPAVLQSSGLYSLSSVVTVPSSSLGTQTYICNVNHKPSNTKVDKKVEPKSCDKTHTCPPCPAPELLGGPSVFLFPPKPKDTLMISRTPEVTCVVVDVSHEDPEVKFNWYVDGVEVHNAKTKPREEQYNSTYRVVSVLTVLHQDWLNGKEYKCKVSNKALPASIEKTISKAKGQPREPQVYTLPPSRDELTKNQVSLTCLVKGFYPSDIAVEWESNGQPENNYKTTPPVLDSDGSFFLYSKLTVDKSRWQQGNVFSCSVMHGALHNHYTQKSLSLSPGK

SEQ ID NO: 1912 - protein, 452 aa, synthetic construct
  REGION 1..452: note = Description of Artificial Sequence: Synthetic polypeptide
  REGION 1..452: note = Synthetic Construct
QVQLVQSGAEVKKPGSSVKVSCKASGYAFSSDWMNWVRQAPGQGLEWMGRIYPGEGDTNYARKFHGRVTITADESTSTAYMELSSLRSEDTAVYYCARLLRNKPGESYAMDYWGQGTLVTVSSASTKGPSVFPLAPSSKSTSGGTAALGCLVKDYFPEPVTVSWNSGALTSGVHTFPAVLQSSGLYSLSSVVTVPSSSLGTQTYICNVNHKPSNTKVDKKVEPKSCDKTHTCPPCPAPELLGGPSVFLFPPKPKDTLMISRTPEVTCVVVDVSHEDPEVKFNWYVDGVEVHNAKTKPREEQYNSTYRVVSVLTVLHQDWLNGKEYKCKVSNKALPASIEKTISKAKGQPREPQVYTLPPSRDELTKNQVSLTCLVKGFYPSDIAVEWESNGQPENNYKTTPPVLDSDGSFFLYSKLTVDKSRWQQGNVFSCSVMHGALHNHYTQKSLSLSPG

SEQ ID NO: 1913 - protein, 453 aa, synthetic construct
  REGION 1..453: note = Description of Artificial Sequence: Synthetic polypeptide
  REGION 1..453: note = Synthetic Construct
QVQLVQSGAEVKKPGSSVKVSCKASGYAFSSQWMNWVRQAPGQGLEWMGRIYPGEGDTNYARKFQGRVTITADESTSTAYMELSSLRSEDTAVYYCARLLRNQPGESYAMDYWGQGTLVTVSSASTKGPSVFPLAPSSKSTSGGTAALGCLVKDYFPEPVTVSWNSGALTSGVHTFPAVLQSSGLYSLSSVVTVPSSSLGTQTYICNVNHKPSNTKVDKKVEPKSCDKTHTCPPCPAPELLGGPSVFLFPPKPKDTLMISRTPEVTCVVVDVSHEDPEVKFNWYVDGVEVHNAKTKPREEQYNSTYRVVSVLTVLHQDWLNGKEYKCKVSNKALPAPIEKTISKAKGQPREPQVYTLPPSRDELTKNQVSLTCLVKGFYPSDIAVEWESNGQPENNYKTTPPVLDSDGSFFLYSKLTVDKSRWQQGNVFSCSVMHEALHNHYTQKSLSLSPGK

SEQ ID NO: 1914 - protein, 452 aa, synthetic construct
  REGION 1..452: note = Description of Artificial Sequence: Synthetic polypeptide
  REGION 1..452: note = Synthetic Construct
QVQLVQSGAEVKKPGSSVKVSCKASGYAFSSQWMNWVRQAPGQGLEWMGRIYPGEGDTNYARKFQGRVTITADESTSTAYMELSSLRSEDTAVYYCARLLRNQPGESYAMDYWGQGTLVTVSSASTKGPSVFPLAPSSKSTSGGTAALGCLVKDYFPEPVTVSWNSGALTSGVHTFPAVLQSSGLYSLSSVVTVPSSSLGTQTYICNVNHKPSNTKVDKKVEPKSCDKTHTCPPCPAPELLGGPSVFLFPPKPKDTLMISRTPEVTCVVVDVSHEDPEVKFNWYVDGVEVHNAKTKPREEQYNSTYRVVSVLTVLHQDWLNGKEYKCKVSNKALPAPIEKTISKAKGQPREPQVYTLPPSRDELTKNQVSLTCLVKGFYPSDIAVEWESNGQPENNYKTTPPVLDSDGSFFLYSKLTVDKSRWQQGNVFSCSVMHEALHNHYTQKSLSLSPG

SEQ ID NO: 1915 - protein, 453 aa, synthetic construct
  REGION 1..453: note = Description of Artificial Sequence: Synthetic polypeptide
  REGION 1..453: note = Synthetic Construct
QVQLVQSGAEVKKPGSSVKVSCKASGYAFSSHWMNWVRQAPGQGLEWMGRIYPGGGDTNYAQKFRGRVTITADESTSTAYMELSSLRSEDTAVYYCARLLRNQPGASYAMDYWGQGTLVTVSSASTKGPSVFPLAPSSKSTSGGTAALGCLVKDYFPEPVTVSWNSGALTSGVHTFPAVLQSSGLYSLSSVVTVPSSSLGTQTYICNVNHKPSNTKVDKKVEPKSCDKTHTCPPCPAPELLGGPSVFLFPPKPKDTLMISRTPEVTCVVVDVSHEDPEVKFNWYVDGVEVHNAKTKPREEQYNSTYRVVSVLTVLHQDWLNGKEYKCKVSNKALPAPIEKTISKAKGQPREPQVYTLPPSRDELTKNQVSLTCLVKGFYPSDIAVEWESNGQPENNYKTTPPVLDSDGSFFLYSKLTVDKSRWQQGNVFSCSVMHEALHNHYTQKSLSLSPGK

SEQ ID NO: 1916 - protein, 452 aa, synthetic construct
  REGION 1..452: note = Description of Artificial Sequence: Synthetic polypeptide
  REGION 1..452: note = Synthetic Construct
QVQLVQSGAEVKKPGSSVKVSCKASGYAFSSHWMNWVRQAPGQGLEWMGRIYPGGGDTNYAQKFRGRVTITADESTSTAYMELSSLRSEDTAVYYCARLLRNQPGASYAMDYWGQGTLVTVSSASTKGPSVFPLAPSSKSTSGGTAALGCLVKDYFPEPVTVSWNSGALTSGVHTFPAVLQSSGLYSLSSVVTVPSSSLGTQTYICNVNHKPSNTKVDKKVEPKSCDKTHTCPPCPAPELLGGPSVFLFPPKPKDTLMISRTPEVTCVVVDVSHEDPEVKFNWYVDGVEVHNAKTKPREEQYNSTYRVVSVLTVLHQDWLNGKEYKCKVSNKALPAPIEKTISKAKGQPREPQVYTLPPSRDELTKNQVSLTCLVKGFYPSDIAVEWESNGQPENNYKTTPPVLDSDGSFFLYSKLTVDKSRWQQGNVFSCSVMHEALHNHYTQKSLSLSPG

SEQ ID NO: 1917 - protein, 453 aa, synthetic construct
  REGION 1..453: note = Description of Artificial Sequence: Synthetic polypeptide
  REGION 1..453: note = Synthetic Construct
QVQLVQSGAEVKKPGSSVKVSCKASGYAFSSHWMNWVRQAPGQGLEWMGRIYPGGGDTNYARKFRGRVTITADESTSTAYMELSSLRSEDTAVYYCARLLRNQPGASYAMDYWGQGTLVTVSSASTKGPSVFPLAPSSKSTSGGTAALGCLVKDYFPEPVTVSWNSGALTSGVHTFPAVLQSSGLYSLSSVVTVPSSSLGTQTYICNVNHKPSNTKVDKKVEPKSCDKTHTCPPCPAPELLGGPSVFLFPPKPKDTLMISRTPEVTCVVVDVSHEDPEVKFNWYVDGVEVHNAKTKPREEQYNSTYRVVSVLTVLHQDWLNGKEYKCKVSNKALPAPIEKTISKAKGQPREPQVYTLPPSRDELTKNQVSLTCLVKGFYPSDIAVEWESNGQPENNYKTTPPVLDSDGSFFLYSKLTVDKSRWQQGNVFSCSVMHEALHNHYTQKSLSLSPGK

SEQ ID NO: 1918 - protein, 452 aa, synthetic construct
  REGION 1..452: note = Description of Artificial Sequence: Synthetic polypeptide
  REGION 1..452: note = Synthetic Construct
QVQLVQSGAEVKKPGSSVKVSCKASGYAFSSHWMNWVRQAPGQGLEWMGRIYPGGGDTNYARKFRGRVTITADESTSTAYMELSSLRSEDTAVYYCARLLRNQPGASYAMDYWGQGTLVTVSSASTKGPSVFPLAPSSKSTSGGTAALGCLVKDYFPEPVTVSWNSGALTSGVHTFPAVLQSSGLYSLSSVVTVPSSSLGTQTYICNVNHKPSNTKVDKKVEPKSCDKTHTCPPCPAPELLGGPSVFLFPPKPKDTLMISRTPEVTCVVVDVSHEDPEVKFNWYVDGVEVHNAKTKPREEQYNSTYRVVSVLTVLHQDWLNGKEYKCKVSNKALPAPIEKTISKAKGQPREPQVYTLPPSRDELTKNQVSLTCLVKGFYPSDIAVEWESNGQPENNYKTTPPVLDSDGSFFLYSKLTVDKSRWQQGNVFSCSVMHEALHNHYTQKSLSLSPG

SEQ ID NO: 1919 - protein, 453 aa, synthetic construct
  REGION 1..453: note = Description of Artificial Sequence: Synthetic polypeptide
  REGION 1..453: note = Synthetic Construct
QVQLVQSGAEVKKPGSSVKVSCKASGYAFSSHWMNWVRQAPGQGLEWMGRIYPGEGDTNYAQKFRGRVTITADESTSTAYMELSSLRSEDTAVYYCARLLRNQPGASYAMDYWGQGTLVTVSSASTKGPSVFPLAPSSKSTSGGTAALGCLVKDYFPEPVTVSWNSGALTSGVHTFPAVLQSSGLYSLSSVVTVPSSSLGTQTYICNVNHKPSNTKVDKKVEPKSCDKTHTCPPCPAPELLGGPSVFLFPPKPKDTLMISRTPEVTCVVVDVSHEDPEVKFNWYVDGVEVHNAKTKPREEQYNSTYRVVSVLTVLHQDWLNGKEYKCKVSNKALPAPIEKTISKAKGQPREPQVYTLPPSRDELTKNQVSLTCLVKGFYPSDIAVEWESNGQPENNYKTTPPVLDSDGSFFLYSKLTVDKSRWQQGNVFSCSVMHEALHNHYTQKSLSLSPGK

SEQ ID NO: 1920 - protein, 452 aa, synthetic construct
  REGION 1..452: note = Description of Artificial Sequence: Synthetic polypeptide
  REGION 1..452: note = Synthetic Construct
QVQLVQSGAEVKKPGSSVKVSCKASGYAFSSHWMNWVRQAPGQGLEWMGRIYPGEGDTNYAQKFRGRVTITADESTSTAYMELSSLRSEDTAVYYCARLLRNQPGASYAMDYWGQGTLVTVSSASTKGPSVFPLAPSSKSTSGGTAALGCLVKDYFPEPVTVSWNSGALTSGVHTFPAVLQSSGLYSLSSVVTVPSSSLGTQTYICNVNHKPSNTKVDKKVEPKSCDKTHTCPPCPAPELLGGPSVFLFPPKPKDTLMISRTPEVTCVVVDVSHEDPEVKFNWYVDGVEVHNAKTKPREEQYNSTYRVVSVLTVLHQDWLNGKEYKCKVSNKALPAPIEKTISKAKGQPREPQVYTLPPSRDELTKNQVSLTCLVKGFYPSDIAVEWESNGQPENNYKTTPPVLDSDGSFFLYSKLTVDKSRWQQGNVFSCSVMHEALHNHYTQKSLSLSPG

SEQ ID NO: 1921 - protein, 219 aa, synthetic construct
  REGION 1..219: note = Description of Artificial Sequence: Synthetic polypeptide
  REGION 1..219: note = Synthetic Construct
DVVMTQSPDSLAVSLGERATINCRSSQSLVHSNRYTYLHWYQQKPGQSPKLLIYKVSNRFSGVPDRFSGSGSGTDFTLKISRVEAEDVGVYYCSQSTRVPYTFGQGTKLEIKRTVAAPSVFIFPPSDEQLKSGTASVVCLLNNFYPREAKVQWKVDNALQSGNSQESVTEQDSKDSTYSLSSTLTLSKADYEKHKVYACEVTHQGLSSPVTKSFNRGEC

SEQ ID NO: 1922 - protein, 219 aa, synthetic construct
  REGION 1..219: note = Description of Artificial Sequence: Synthetic polypeptide
  REGION 1..219: note = Synthetic Construct
DVVMTQTPLSLSVTPGQPASISCRTSQSLVHSNAYTYLHWYLQKPGQSPQLLIYKVSNRVSGVPDRFSGSGSGTDFTLKISRVEAEDVGVYYCSQSTRVPYTFGQGTKLEIKRTVAAPSVFIFPPSDEQLKSGTASVVCLLNNFYPREAKVQWKVDNALQSGNSQESVTEQDSKDSTYSLSSTLTLSKADYEKHKVYACEVTHQGLSSPVTKSFNRGEC

SEQ ID NO: 1923 - protein, 219 aa, synthetic construct
  REGION 1..219: note = Description of Artificial Sequence: Synthetic polypeptide
  REGION 1..219: note = Synthetic Construct
GVVMTQTPLSLSVTPGQPASISCRSSQSLVHSNQYTYLHWYLQKPGQSPQLLIYKVSNRRSGVPDRFSGSGSGTDFTLKISRVEAEDVGVYYCSQSTRVPYTFGQGTKLEIKRTVAAPSVFIFPPSDEQLKSGTASVVCLLNNFYPREAKVQWKVDNALQSGNSQESVTEQDSKDSTYSLSSTLTLSKADYEKHKVYACEVTHQGLSSPVTKSFNRGEC

SEQ ID NO: 1924 - protein, 219 aa, synthetic construct
  REGION 1..219: note = Description of Artificial Sequence: Synthetic polypeptide
  REGION 1..219: note = Synthetic Construct
GVVMTQTPLSLSVTPGQPASISCRSSRSLVHSNQYTYLHWYLQKPGQSPQLLIYKVSNRRSGVPDRFSGSGSGTDFTLKISRVEAEDVGVYYCSQSTRVPYTFGQGTKLEIKRTVAAPSVFIFPPSDEQLKSGTASVVCLLNNFYPREAKVQWKVDNALQSGNSQESVTEQDSKDSTYSLSSTLTLSKADYEKHKVYACEVTHQGLSSPVTKSFNRGEC

SEQ ID NO: 1925 - protein, 219 aa, synthetic construct
  REGION 1..219: note = Description of Artificial Sequence: Synthetic polypeptide
  REGION 1..219: note = Synthetic Construct
GVVMTQTPLSLSVTPGQPASISCRTSRSLVHSNRYTYLHWYLQKPGQSPQLLIYKVSNRRSGVPDRFSGSGSGTDFTLKISRVEAEDVGVYYCSQSTRVPYTFGQGTKLEIKRTVAAPSVFIFPPSDEQLKSGTASVVCLLNNFYPREAKVQWKVDNALQSGNSQESVTEQDSKDSTYSLSSTLTLSKADYEKHKVYACEVTHQGLSSPVTKSFNRGEC

SEQ ID NO: 1926 - protein, 219 aa, Homo sapiens
MEPLRLLILLFVTELSGAHNTTVFQGVAGQSLQVSCPYDSMKHWGRRKAWCRQLGEKGPCQRVVSTHNLWLLSFLRRWNGSTAITDDTLGGTLTITLRNLQPHDAGLYQCQSLHGSEADTLRKVLVEVLADPLDHRDAGDLWFPGESESFEDAHVEHSISRAERHVKEDDGRKSPGEVPPGTSPACILATWPPGLLVLLWQETTLPEHCFSWTLEAGTG

SEQ ID NO: 1927 - protein, 222 aa, Homo sapiens
MEPLRLLILLFVTELSGAHNTTVFQGVAGQSLQVSCPYDSMKHWGRRKAWCRQLGEKGPCQRVVSTHNLWLLSFLRRWNGSTAITDDTLGGTLTITLRNLQPHDAGLYQCQSLHGSEADTLRKVLVEVLADPLDHRDAGDLWFPGESESFEDAHVEHSISRPSQGSHLPSCLSKEPLGRRNPLPTHFHPSPPGLHLSHQDSSSQRPLGCSLAWTEARDTSTQ

SEQ ID NO: 1928 - protein, 227 aa, Mus musculus; identical to SEQ ID NO: 822

SEQ ID NO: 1929 - protein, 249 aa, Mus musculus
MGPLHQFLLLLITALSQALNTTVLQGMAGQSLRVSCTYDALKHWGRRKAWCRQLGEEGPCQRVVSTHGVWLLAFLKKRNGSTVIADDTLAGTVTITLKNLQAGDAGLYQCQSLRGREAEVLQKVLVEVLEDPLDDQDAGDLWVPEESSSFEGAQVEHSTSRQVSSCGSPLAYHLPPLSKESRDLLPTHLHSSPPGLRSPEQVSCSQHPLGCGQGQAEAGNTCGQRAGLWPRCWAPTSDPHWTRRYVREF

SEQ ID NO: 1930 - protein, 228 aa, Rattus norvegicus; identical to SEQ ID NO: 823

SEQ ID NO: 1931 - protein, 10 aa, synthetic construct
  REGION 1..10: note = Description of Artificial Sequence: Synthetic peptide
  REGION 1..10: note = Peptide for immunization for generating an antibody against human TREM2
AHVEHSISRS

SEQ ID NO: 1932 - protein, 7 aa, synthetic construct
  REGION 1..7: note = Description of Artificial Sequence: Synthetic peptide
  REGION 1..7: note = Peptide for immunization for generating an antibod against human TREM2
EDAHVEH

SEQ ID NO: 1933 - protein, 6 aa, synthetic construct
  REGION 1..6: note = Description of Artificial Sequence: Synthetic peptide
  REGION 1..6: note = Peptide for immunization for generating an antibody against human TREM2
SISRSL

SEQ ID NO: 1934 - protein, 10 aa, synthetic construct
  REGION 1..10: note = Description of Artificial Sequence: Synthetic peptide
  REGION 1..10: note = Peptide for immunization for generating an antibody against murine TREM2
AQVEHSTSRN

SEQ ID NO: 1935 - protein, 7 aa, synthetic construct
  REGION 1..7: note = Description of Artificial Sequence: Synthetic peptide
  REGION 1..7: note = Peptide for immunization for generating an antibody against murine TREM2
EGAQVEH

SEQ ID NO: 1936 - protein, 6 aa, synthetic construct
  REGION 1..6: note = Description of Artificial Sequence: Synthetic peptide
  REGION 1..6: note = Peptide for immunization for generating an antibody against murine TREM2
STSRNQ

SEQ ID NO: 1937 - protein, 10 aa, synthetic construct
  REGION 1..10: note = Description of Artificial Sequence: Synthetic peptide
  REGION 1..10: note = Peptide for immunization for generating an antibody against rat TREM2
AQVEHSTSSQ

SEQ ID NO: 1938 - protein, 7 aa, synthetic construct
  REGION 1..7: note = Description of Artificial Sequence: Synthetic peptide
  REGION 1..7: note = Peptide for immunization for generating an antibody against rat TREM2
EGAQVEH

SEQ ID NO: 1939 - protein, 6 aa, synthetic construct
  REGION 1..6: note = Description of Artificial Sequence: Synthetic peptide
  REGION 1..6: note = Peptide for immunization for generating an antibody against rat TREM2
STSSQV

SEQ ID NO: 1940 - protein, 30 aa, synthetic construct
  REGION 1..30: note = Description of Artificial Sequence: Synthetic polypeptide
  REGION 1..30: note = Amino acid stretch within human TREM2, wherein the minimal cleavage site of ADAM10 can be predicted
GESESFEDAHVEHSISRSLLEGEIPFPPTS

SEQ ID NO: 1941 - protein, 171 aa, synthetic construct
  REGION 1..171: note = Description of Artificial Sequence: Synthetic polypeptide
  REGION 1..171: note = Ectodomain of murine TREM2
MGPLHQFLLLLITALSQALNTTVLQGMAGQSLRVSCTYDALKHWGRRKAWCRQLGEEGPCQRVVSTHGVWLLAFLKKRNGSTVIADDTLAGTVTITLKNLQAGDAGLYQCQSLRGREAEVLQKVLVEVLEDPLDDQDAGDLWVPEESSSFEGAQVEHSTSRNQETSFPPTS

SEQ ID NO: 1942 - protein, 35 aa, synthetic construct
  REGION 1..35: note = Description of Artificial Sequence: Synthetic polypeptide
  REGION 1..35: note = Intracellular domain of human TREM2
AAWHGQKPGTHPPSELDCGHDPGYQLQTLPGLRDT

SEQ ID NO: 1943 - protein, 35 aa, synthetic construct
  REGION 1..35: note = Description of Artificial Sequence: Synthetic polypeptide
  REGION 1..35: note = Intracellular domain of murine TREM2
VARGRQKPGTPVVRGLDCGQDAGHQLQILTGPGGT

SEQ ID NO: 1944 - protein, 11 aa, synthetic construct
  REGION 1..11: note = Description of Artificial Sequence: Synthetic peptide
  REGION 1..11: note = Peptide for immunization for generating an antibody against human TREM2
GESESFEDAHV

SEQ ID NO: 1945 - protein, 13 aa, synthetic construct
  REGION 1..13: note = Description of Artificial Sequence: Synthetic peptide
  REGION 1..13: note = Peptide for immunization for generating an antibody against murine TREM2
EHSTSRNQETSFP

SEQ ID NO: 1946 - protein, 122 aa, synthetic construct
  REGION 1..122: note = Description of Artificial Sequence: Synthetic polypeptide
  REGION 1..122: note = Clone 14D3 variable region of the heavy chain
EVKLLEFGGGLVQPGGSMRLSCAASGFTFTDFYMNWIRQPAGRAPEWLGLIRNKTKGYTTEYNRSVKGRFTISRDNTQNMLYLQMNSLRPEDTATYYCARIGVNNGGSLDYWGQGVMVTVSS

SEQ ID NO: 1947 - protein, 122 aa, synthetic construct
  REGION 1..122: note = Description of Artificial Sequence: Synthetic polypeptide
  REGION 1..122: note = Clone 14D8 variable region of the heavy chain
EVKLLESGGGLVQPGGSMRLSCAASGFTFTDFYMNWIRQPAGKAPEWLGLIRNKANGYTTVYNPSVKGRFTISRDNTQNMLYLQMNTLRGEDTATYYCARIGINNGGSLDYWGQGVMVTVSS

SEQ ID NO: 1948 - protein, 122 aa, synthetic construct
  REGION 1..122: note = Description of Artificial Sequence: Synthetic polypeptide
  REGION 1..122: note = Clone 7A12 variable region of the heavy chain
EVKLLESGGGLVQPGGSMRLSCAASGFTFTDFYMNWIRQPAGKAPEWLGLIRNKANGYTTQYNPSVKGRFTISRDNTQNMLYLQMNTLRGEDTATYYCARIGINNGGSLDYWGQGVMVTVSS

SEQ ID NO: 1949 - protein, 122 aa, synthetic construct
  REGION 1..122: note = Description of Artificial Sequence: Synthetic polypeptide
  REGION 1..122: note = Clone 8A11 variable region of the heavy chain
EVKLLESGGGLVQPGGSMRLSCAASGFTFTDFYMNWIRQPAGKAPEWLGLIRNKTKGYTTEYNTSVKGRFTISRDNTQNMLYLQMNSLRPEDTATYYCARIGVNNGGSLDYWGQGVMVTVSS

SEQ ID NO: 1950 - protein, 122 aa, synthetic construct; identical to SEQ ID NO: 1948
  REGION 1..122: note = Description of Artificial Sequence: Synthetic polypeptide
  REGION 1..122: note = Clone 21A3 variable region of the heavy chain

SEQ ID NO: 1951 - protein, 122 aa, synthetic construct
  REGION 1..122: note = Description of Artificial Sequence: Synthetic polypeptide
  REGION 1..122: note = Clone 10C3 variable region of the heavy chain
EVKLLESGGGLVQPGGSMRLSCAASGFTFTDFYMNWIRQPAGETPEWLGLIRNKTKGYTTEYNPSVKGRFTISRDNTQNMLYLQMNSLRPEDTATYYCARIGTNNGGSLDYWGQGVMVTVSS

SEQ ID NO: 1952 - protein, 122 aa, synthetic construct
  REGION 1..122: note = Description of Artificial Sequence: Synthetic polypeptide
  REGION 1..122: note = Clone 18F9 variable region of the heavy chain
EVKLLESGGGLVQPGGSMRLSCVVSGFTFTDFYMNWIRQAAGKAPEWLGLIRNKVNGYRTEYNPSVKGRFTISRDNIQNMLYLQMNTLRAEDTATYYCARIGINNGGSLDYWGQGVMVTVSS

SEQ ID NO: 1953 - protein, 122 aa, synthetic construct
  REGION 1..122: note = Description of Artificial Sequence: Synthetic polypeptide
  REGION 1..122: note = Clone 15C5 variable region of the heavy chain
EVKLLESGGGLVQPGGSMRLSCAASGFTFTDFYMNWIRQPAGKAPEWLGLIRNKAYGYTTEYNPSVKGRFTISRDNTQDMLYLQMNTLRAEDTATYYCARIGINYGGSLDYWGQGVMVTVSS

SEQ ID NO: 1954 - protein, 122 aa, synthetic construct
  REGION 1..122: note = Description of Artificial Sequence: Synthetic polypeptide
  REGION 1..122: note = Clone 1G6 variable region of the heavy chain
EVKLLESGGGLVQPGGSLRLSCVASGFTFTDFYMNWIRQPAGKAPEWLGLIRNKANGFTTEYNPSVKGRFTISRDNTQHMLYLQMNTLRAEDTATYYCARIGINNGGSLDYWGQGVMVTVSS

SEQ ID NO: 1955 - protein, 121 aa, synthetic construct
  REGION 1..121: note = Description of Artificial Sequence: Synthetic polypeptide
  REGION 1..121: note = Consensus sequence
EVKLLESGGGLVQPGGSMRLSCAASGFTFTDFYMNWIRQPAGKAPEWLGLIRNKANGYTTEYNPSVKGRFTISRDNTQNMLYLQMNTLREDTATYYCARIGINNGGSLDYWGQGVMVTVSS

SEQ ID NO: 1956 - protein, 113 aa, synthetic construct
  REGION 1..113: note = Description of Artificial Sequence: Synthetic polypeptide
  REGION 1..113: note = Clone 14D3 variable region of the light chain
DILIIQSPASLTVSAGARVTMSCKSSQSLLYSENNQDYLAWYQQKPGQFPKLLIYGASNRHTGVPDRFTGSGSGTDFTLTISSVQAEDLADYYCEQTYSYPYTFGAGTKLELK

SEQ ID NO: 1957 - protein, 113 aa, synthetic construct
  REGION 1..113: note = Description of Artificial Sequence: Synthetic polypeptide
  REGION 1..113: note = Clone 14D8 variable region of the light chain
DILINQSPASLTVSTGEKVTMSCRSSQSLLYSEKNQDYLAWYQQKPGQFPKLLIYGASYRHTGVPDRFTGSGSGTDFTLTISSVQAEDLADYYCEQTYSYPYTFGAGTKLELK

SEQ ID NO: 1958 - protein, 113 aa, synthetic construct
  REGION 1..113: note = Description of Artificial Sequence: Synthetic polypeptide
  REGION 1..113: note = Clone 7A12 variable region of the light chain
DILINQSPASLTVSAGEKVTMSCKSSQSLLYSEKNQDYLAWYQQKPGQSPKLLMYGASYRHTGVPDRFTGSGSGTDFTLTISSVQAEDLADYYCEQTYSYPYTFGAGTKLELK

SEQ ID NO: 1959 - protein, 113 aa, synthetic construct; identical to SEQ ID NO: 1956
  REGION 1..113: note = Description of Artificial Sequence: Synthetic polypeptide
  REGION 1..113: note = Clone 8A11 variable region of the light chain

SEQ ID NO: 1960 - protein, 113 aa, synthetic construct; identical to SEQ ID NO: 1958
  REGION 1..113: note = Description of Artificial Sequence: Synthetic polypeptide
  REGION 1..113: note = Clone 21A3 variable region of the light chain

SEQ ID NO: 1961 - protein, 113 aa, synthetic construct; identical to SEQ ID NO: 1956
  REGION 1..113: note = Description of Artificial Sequence: Synthetic polypeptide
  REGION 1..113: note = Clone 10C3 variable region of the light chain

SEQ ID NO: 1962 - protein, 113 aa, synthetic construct
  REGION 1..113: note = Description of Artificial Sequence: Synthetic polypeptide
  REGION 1..113: note = Clone 18F9 variable chain of the light region
DILINQSPASLTVSAGEKVTMSCKSSQSLLYSENNQDYLAWYQQKPGQFPKLLIYGASNRHTGVPDRFTGSGSGTDFTLTISSVQAEDLADYYCEQTYSYPYTFGAGTKLELK

SEQ ID NO: 1963 - protein, 113 aa, synthetic construct
  REGION 1..113: note = Description of Artificial Sequence: Synthetic polypeptide
  REGION 1..113: note = Clone 15C5 variable region of the light chain
DILINQSPASLTVSAGEKVTVSCKSSQSLLYSESNQDYLAWYQQKPGQFPKLLIYGASYRHTGVPDRFTGSGSGTDFTLTISSVQAEDLAHYYCEQTYSYPYTFGAGTKLELK

SEQ ID NO: 1964 - protein, 113 aa, synthetic construct
  REGION 1..113: note = Description of Artificial Sequence: Synthetic polypeptide
  REGION 1..113: note = Clone 1G6 variable region of the light chain
DILINQSPASLTVSTGEKVTMSCKSSQSLLYSENKQDYLAWYQQKPGQFPKLLIYGASNRHTGVPDRFTGSGSGTDFTLTINIVQAEDLADYYCEQTYSYPYTFGAGTKLELK

SEQ ID NO: 1965 - protein, 113 aa, synthetic construct; identical to SEQ ID NO: 1962
  REGION 1..113: note = Description of Artificial Sequence: Synthetic polypeptide
  REGION 1..113: note = Consensus sequence

SEQ ID NO: 1966 - protein, 8 aa, synthetic construct
  REGION 1..8: note = Description of Artificial Sequence: Synthetic peptide
  REGION 1..8: note = Clone 14D3 CDR1 of the heavy chain
GFTFTDFY

SEQ ID NO: 1967 - protein, 8 aa, synthetic construct
  REGION 1..8: note = Description of Artificial Sequence: Synthetic peptide
  REGION 1..8: note = Clone 14D8 CDR1 of the heavy chain
GFTFTDFY

SEQ ID NO: 1968 - protein, 8 aa, synthetic construct
  REGION 1..8: note = Description of Artificial Sequence: Synthetic peptide
  REGION 1..8: note = Clone 7A12 CDR1 of the heavy chain
GFTFTDFY

SEQ ID NO: 1969 - protein, 8 aa, synthetic construct
  REGION 1..8: note = Description of Artificial Sequence: Synthetic peptide
  REGION 1..8: note = Clone 8A11 CDR1 of the heavy chain
GFTFTDFY

SEQ ID NO: 1970 - protein, 8 aa, synthetic construct
  REGION 1..8: note = Description of Artificial Sequence: Synthetic peptide
  REGION 1..8: note = Clone 21A3 CDR1 of the heavy chain
GFTFTDFY

SEQ ID NO: 1971 - protein, 8 aa, synthetic construct
  REGION 1..8: note = Description of Artificial Sequence: Synthetic peptide
  REGION 1..8: note = Clone 10C3 CDR1 of the heavy chain
GFTFTDFY

SEQ ID NO: 1972 - protein, 8 aa, synthetic construct
  REGION 1..8: note = Description of Artificial Sequence: Synthetic peptide
  REGION 1..8: note = Clone 18F9 CDR1 of the heavy chain
GFTFTDFY

SEQ ID NO: 1973 - protein, 8 aa, synthetic construct
  REGION 1..8: note = Description of Artificial Sequence: Synthetic peptide
  REGION 1..8: note = Clone 15C5 CDR1
GFTFTDFY

SEQ ID NO: 1974 - protein, 8 aa, synthetic construct
  REGION 1..8: note = Description of Artificial Sequence: Synthetic peptide
  REGION 1..8: note = Clone 1G6 CDR1 of the heavy chain
GFTFTDFY

SEQ ID NO: 1975 - protein, 8 aa, synthetic construct
  REGION 1..8: note = Description of Artificial Sequence: Synthetic peptide
  REGION 1..8: note = Consensus Sequence CDR1 of the heavy chain
GFTFTDFY

SEQ ID NO: 1976 - protein, 10 aa, synthetic construct
  REGION 1..10: note = Description of Artificial Sequence: Synthetic peptide
  REGION 1..10: note = Clone 14D3 CDR2 of the heavy chain
IRNKTKGYTT

SEQ ID NO: 1977 - protein, 10 aa, synthetic construct
  REGION 1..10: note = Description of Artificial Sequence: Synthetic peptide
  REGION 1..10: note = Clone 14D8 CDR2 of the heavy chain
IRNKANGYTT

SEQ ID NO: 1978 - protein, 10 aa, synthetic construct
  REGION 1..10: note = Description of Artificial Sequence: Synthetic peptide
  REGION 1..10: note = Clone 7A12 CDR2
IRNKANGYTT

SEQ ID NO: 1979 - protein, 10 aa, synthetic construct
  REGION 1..10: note = Description of Artificial Sequence: Synthetic peptide
  REGION 1..10: note = Clone 8A11 CDR2 of the heavy chain
IRNKTKGYTT

SEQ ID NO: 1980 - protein, 10 aa, synthetic construct
  REGION 1..10: note = Description of Artificial Sequence: Synthetic peptide
  REGION 1..10: note = Clone 21A3 CDR2 of the heavy chain
IRNKANGYTT

SEQ ID NO: 1981 - protein, 10 aa, synthetic construct
  REGION 1..10: note = Description of Artificial Sequence: Synthetic peptide
  REGION 1..10: note = Clone 10C3 CDR2 of the heavy chain
IRNKTKGYTT

SEQ ID NO: 1982 - protein, 10 aa, synthetic construct
  REGION 1..10: note = Description of Artificial Sequence: Synthetic peptide
  REGION 1..10: note = Clone 18F9 CDR2 of the heavy chain
IRNKVNGYRT

SEQ ID NO: 1983 - protein, 10 aa, synthetic construct
  REGION 1..10: note = Description of Artificial Sequence: Synthetic peptide
  REGION 1..10: note = Clone 15C5 CDR2 of the heavy chain
IRNKAYGYTT

SEQ ID NO: 1984 - protein, 10 aa, synthetic construct
  REGION 1..10: note = Description of Artificial Sequence: Synthetic peptide
  REGION 1..10: note = Clone 1G6 CDR2 of the heavy chain
IRNKANGFTT

SEQ ID NO: 1985 - protein, 10 aa, synthetic construct
  REGION 1..10: note = Description of Artificial Sequence: Synthetic peptide
  REGION 1..10: note = Consensus Sequence CDR2 of the heavy chain
IRNKANGYTT

SEQ ID NO: 1986 - protein, 15 aa, synthetic construct
  REGION 1..15: note = Description of Artificial Sequence: Synthetic peptide
  REGION 1..15: note = Clone 14D3 CDR3 of the heavy chain
ARIGVNNGGSLDYWG

SEQ ID NO: 1987 - protein, 15 aa, synthetic construct
  REGION 1..15: note = Description of Artificial Sequence: Synthetic peptide
  REGION 1..15: note = Clone 14D8 CDR3 of the heavy chain
ARIGINNGGSLDYWG

SEQ ID NO: 1988 - protein, 15 aa, synthetic construct
  REGION 1..15: note = Description of Artificial Sequence: Synthetic peptide
  REGION 1..15: note = Clone 7A12 CDR3 of the heavy chain
ARIGINNGGSLDYWG

SEQ ID NO: 1989 - protein, 15 aa, synthetic construct
  REGION 1..15: note = Description of Artificial Sequence: Synthetic peptide
  REGION 1..15: note = Clone 8A11 CDR3 of the heavy chain
ARIGVNNGGSLDYWG

SEQ ID NO: 1990 - protein, 15 aa, synthetic construct
  REGION 1..15: note = Description of Artificial Sequence: Synthetic peptide
  REGION 1..15: note = Clone 21A3 CDR3 of the heavy chain
ARIGINNGGSLDYWG

SEQ ID NO: 1991 - protein, 15 aa, synthetic construct
  REGION 1..15: note = Description of Artificial Sequence: Synthetic peptide
  REGION 1..15: note = Clone 10C3 CDR3 of the heavy chain
ARIGTNNGGSLDYWG

SEQ ID NO: 1992 - protein, 15 aa, synthetic construct
  REGION 1..15: note = Description of Artificial Sequence: Synthetic peptide
  REGION 1..15: note = Clone 18F9 CDR3 of the heavy chain
ARIGINNGGSLDYWG

SEQ ID NO: 1993 - protein, 15 aa, synthetic construct
  REGION 1..15: note = Description of Artificial Sequence: Synthetic peptide
  REGION 1..15: note = Clone 15C5 CDR3 of the heavy chain
ARIGINYGGSLDYWG

SEQ ID NO: 1994 - protein, 15 aa, synthetic construct
  REGION 1..15: note = Description of Artificial Sequence: Synthetic peptide
  REGION 1..15: note = Clone 1G6 CDR3 of the heavy chain
ARIGINNGGSLDYWG

SEQ ID NO: 1995 - protein, 15 aa, synthetic construct
  REGION 1..15: note = Description of Artificial Sequence: Synthetic peptide
  REGION 1..15: note = Consensus Sequence CDR3 of the heavy chain
ARIGINNGGSLDYWG

SEQ ID NO: 1996 - protein, 12 aa, synthetic construct
  REGION 1..12: note = Description of Artificial Sequence: Synthetic peptide
  REGION 1..12: note = Clone 14D3 CDR1 of the light chain
QSLLYSENNQDY

SEQ ID NO: 1997 - protein, 12 aa, synthetic construct
  REGION 1..12: note = Description of Artificial Sequence: Synthetic peptide
  REGION 1..12: note = Clone 14D8 CDR1 of the light chain
QSLLYSEKNQDY

SEQ ID NO: 1998 - protein, 12 aa, synthetic construct
  REGION 1..12: note = Description of Artificial Sequence: Synthetic peptide
  REGION 1..12: note = Clone 7A12 CDR1 of the light chain
QSLLYSEKNQDY

SEQ ID NO: 1999 - protein, 12 aa, synthetic construct
  REGION 1..12: note = Description of Artificial Sequence: Synthetic peptide
  REGION 1..12: note = Clone 8A11 CDR1 of the light chain
QSLLYSENNQDY

SEQ ID NO: 2000 - protein, 12 aa, synthetic construct
  REGION 1..12: note = Description of Artificial Sequence: Synthetic peptide
  REGION 1..12: note = Clone 21A3 CDR1 of the light chain
QSLLYSEKNQDY

SEQ ID NO: 2001 - protein, 12 aa, synthetic construct
  REGION 1..12: note = Description of Artificial Sequence: Synthetic peptide
  REGION 1..12: note = Clone 10C3 CDR1 of the light chain
QSLLYSENNQDY

SEQ ID NO: 2002 - protein, 12 aa, synthetic construct
  REGION 1..12: note = Description of Artificial Sequence: Synthetic peptide
  REGION 1..12: note = Clone 18F9 CDR1 of the light chain
QSLLYSENNQDY

SEQ ID NO: 2003 - protein, 12 aa, synthetic construct
  REGION 1..12: note = Description of Artificial Sequence: Synthetic peptide
  REGION 1..12: note = Clone 15C5 CDR1 of the light chain
QSLLYSESNQDY

SEQ ID NO: 2004 - protein, 12 aa, synthetic construct
  REGION 1..12: note = Description of Artificial Sequence: Synthetic peptide
  REGION 1..12: note = Clone 1G6 CDR1 of the light chain
QSLLYSENKQDY

SEQ ID NO: 2005 - protein, 12 aa, synthetic construct
  REGION 1..12: note = Description of Artificial Sequence: Synthetic peptide
  REGION 1..12: note = Consensus Sequence CDR1 of the light chain
QSLLYSENNQDY

SEQ ID NO: 2006-2015 - skipped (10 entries)

SEQ ID NO: 2016 - protein, 9 aa, synthetic construct
  REGION 1..9: note = Description of Artificial Sequence: Synthetic peptide
  REGION 1..9: note = Clone 14D3 CDR3 of the light chain
EQTYSYPYT

SEQ ID NO: 2017 - protein, 9 aa, synthetic construct
  REGION 1..9: note = Description of Artificial Sequence: Synthetic peptide
  REGION 1..9: note = Clone 14D8 CDR3 of the light chain
EQTYSYPYT

SEQ ID NO: 2018 - protein, 9 aa, synthetic construct
  REGION 1..9: note = Description of Artificial Sequence: Synthetic peptide
  REGION 1..9: note = Clone 7A12 CDR3 of the light chain
EQTYSYPYT

SEQ ID NO: 2019 - protein, 9 aa, synthetic construct
  REGION 1..9: note = Description of Artificial Sequence: Synthetic peptide
  REGION 1..9: note = Clone 8A11 CDR3 of the light chain
EQTYSYPYT

SEQ ID NO: 2020 - protein, 9 aa, synthetic construct
  REGION 1..9: note = Description of Artificial Sequence: Synthetic peptide
  REGION 1..9: note = Clone 21A3 CDR3 of the light chain
EQTYSYPYT

SEQ ID NO: 2021 - protein, 9 aa, synthetic construct
  REGION 1..9: note = Description of Artificial Sequence: Synthetic peptide
  REGION 1..9: note = Clone 10C3 CDR3 of the light chain
EQTYSYPYT

SEQ ID NO: 2022 - protein, 9 aa, synthetic construct
  REGION 1..9: note = Description of Artificial Sequence: Synthetic peptide
  REGION 1..9: note = Clone 18F9 CDR3 of the light chain
EQTYSYPYT

SEQ ID NO: 2023 - protein, 9 aa, synthetic construct
  REGION 1..9: note = Description of Artificial Sequence: Synthetic peptide
  REGION 1..9: note = Clone 15C5 CDR3 of the light chain
EQTYSYPYT

SEQ ID NO: 2024 - protein, 9 aa, synthetic construct
  REGION 1..9: note = Description of Artificial Sequence: Synthetic peptide
  REGION 1..9: note = Clone 1G6 CDR3 of the light chain
EQTYSYPYT

SEQ ID NO: 2025 - protein, 9 aa, synthetic construct
  REGION 1..9: note = Description of Artificial Sequence: Synthetic peptide
  REGION 1..9: note = Consensus Sequence CDR3 of the light chain
EQTYSYPYT

SEQ ID NO: 2026 - protein, 13 aa, synthetic construct
  REGION 1..13: note = Description of Artificial Sequence: Synthetic peptide
  REGION 1..13: note = First part of TREM2 WT CTF Flag
SISRSLLEGEIPF

SEQ ID NO: 2027 - protein, 8 aa, synthetic construct
  REGION 1..8: note = Description of Artificial Sequence: Synthetic peptide
  REGION 1..8: note = Last part of TREM2 WT CTF Flag
DYKDDDDK

SEQ ID NO: 2028 - protein, 9 aa, synthetic construct
  REGION 1..9: note = Description of Artificial Sequence: Synthetic peptide
  REGION 1..9: note = First part of Flag-TREM2(133-157)
GDYKDDDDK

SEQ ID NO: 2029 - protein, 9 aa, synthetic construct
  REGION 1..9: note = Description of Artificial Sequence: Synthetic peptide
  REGION 1..9: note = Last part of Flag-TREM2(133-157)
SFEDAHVEH

SEQ ID NO: 2030 - protein, 13 aa, synthetic construct
  REGION 1..13: note = Description of Artificial Sequence: Synthetic peptide
  REGION 1..13: note = First part of TREM2 WT CTF
SISRSLLEGEIPF

SEQ ID NO: 2031 - protein, 9 aa, synthetic construct
  REGION 1..9: note = Description of Artificial Sequence: Synthetic peptide
  REGION 1..9: note = Last part of TREM2 WT CTF
QTLPGLRDT

SEQ ID NO: 2032 - protein, 13 aa, synthetic construct
  REGION 1..13: note = Description of Artificial Sequence: Synthetic peptide
  REGION 1..13: note = First part of TREM2 WT CTF Flag L163
LEGEIPFPPTSIL

SEQ ID NO: 2033 - protein, 8 aa, synthetic construct
  REGION 1..8: note = Description of Artificial Sequence: Synthetic peptide
  REGION 1..8: note = Last part of TREM2 WT CTF Flag L163
DYKDDDDK

SEQ ID NO: 2034 - protein, 13 aa, synthetic construct
  REGION 1..13: note = Description of Artificial Sequence: Synthetic peptide
  REGION 1..13: note = First part of TREM2 WT CTF Flag L164
EGEIPFPPTSILL

SEQ ID NO: 2035 - protein, 8 aa, synthetic construct
  REGION 1..8: note = Description of Artificial Sequence: Synthetic peptide
  REGION 1..8: note = Last part of TREM2 WT CTF Flag L164
DYKDDDDK

SEQ ID NO: 2036 - protein, 13 aa, synthetic construct
  REGION 1..13: note = Description of Artificial Sequence: Synthetic peptide
  REGION 1..13: note = First part of TREM2 WT CTF Flag - E165
GEIPFPPTSILLL

SEQ ID NO: 2037 - protein, 8 aa, synthetic construct
  REGION 1..8: note = Description of Artificial Sequence: Synthetic peptide
  REGION 1..8: note = Last part of TREM2 WT CTF Flag E165
DYKDDDDK

SEQ ID NO: 2038 - protein, 30 aa, synthetic construct
  REGION 1..30: note = Description of Artificial Sequence: Synthetic polypeptide
  REGION 1..30: note = Peptide used for immunization to generate cleavage-site-specific antibodies
EDAHVEHSISRSLLEGEIPFPPTSILLLLA

SEQ ID NO: 2039 - protein, 9 aa, synthetic construct
  REGION 1..9: note = Description of Artificial Sequence: Synthetic peptide
  REGION 1..9: note = HA-tag
YPYDVPDYA

SEQ ID NO: 2040 - protein, 8 aa, synthetic construct
  REGION 1..8: note = Description of Artificial Sequence: Synthetic peptide
  REGION 1..8: note = linker sequence
SGGGGGLE

SEQ ID NO: 2041 - protein, 8 aa, synthetic construct
  REGION 1..8: note = Description of Artificial Sequence: Synthetic peptide
  REGION 1..8: note = C-terminal FLAG tag
DYKDDDDK

SEQ ID NO: 2042 - DNA, 20 bp, synthetic construct
  misc_feature 1..20: note = Description of Artificial Sequence: Synthetic oligonucleotide
  misc_feature 1..20: note = Synthetic Construct
  source 1..20: mol_type = other DNA
ggacagggatccagagttcc

SEQ ID NO: 2043 - DNA, 20 bp, synthetic construct
  misc_feature 1..20: note = Description of Artificial Sequence: Synthetic oligonucleotide
  misc_feature 1..20: note = Synthetic Construct
  source 1..20: mol_type = other DNA
agctgggaaggtgtgcacac

SEQ ID NO: 2044 - DNA, 19 bp, synthetic construct
  misc_feature 1..19: note = Description of Artificial Sequence: Synthetic oligonucleotide
  misc_feature 1..19: note = Synthetic Construct
  source 1..19: mol_type = other DNA
caggggccagtggatagac

SEQ ID NO: 2045 - DNA, 20 bp, synthetic construct
  misc_feature 1..20: note = Description of Artificial Sequence: Synthetic oligonucleotide
  misc_feature 1..20: note = Synthetic Construct
  source 1..20: mol_type = other DNA
gacattgatgtctttggggt

SEQ ID NO: 2046 - DNA, 20 bp, synthetic construct
  misc_feature 1..20: note = Description of Artificial Sequence: Synthetic oligonucleotide
  misc_feature 1..20: note = Synthetic Construct
  source 1..20: mol_type = other DNA
ttcactgccatcaatcttcc

SEQ ID NO: 2047 - protein, 140 aa, synthetic construct
  REGION 1..140: note = Description of Artificial Sequence: Synthetic polypeptide
  REGION 1..140: note = Synthetic Construct
QVQLQQPGAELVKPGASVKLSCKASGYTFTSYWMHWVKQSPGRGLEWIGRSDPTTGGTNYNEKFKTKATLTVDKPSSTAYMQLSSLTSDDSAVYYCVRTSGTGDYWGQGTSLTVSSAKTTAPSVYPLAPVCGGTTGSSVT

SEQ ID NO: 2048 - protein, 140 aa, synthetic construct
  REGION 1..140: note = Description of Artificial Sequence: Synthetic polypeptide
  REGION 1..140: note = Synthetic Construct
DVVMTQTPLSLPVSLGDQASISCRSSQSLVHNNGNTFLHWYLQKPGQSPKLLIYKVSNRFSGVPDRFSGSGSGTDFTLKISRVEAEDLGVYFCSQTTHVPPTFGGGTKLEIKRADAAPTVSIFPPSSEQLTSGGASVVCF

SEQ ID NO: 2049 - protein, 7 aa, synthetic construct
  REGION 1..7: note = Description of Artificial Sequence: Synthetic peptide
  REGION 1..7: note = Synthetic Construct
GYTFTSY

SEQ ID NO: 2050 - protein, 15 aa, synthetic construct
  REGION 1..15: note = Description of Artificial Sequence: Synthetic peptide
  REGION 1..15: note = Synthetic Construct
IGRSDPTTGGTNYNE

SEQ ID NO: 2051 - protein, 9 aa, synthetic construct
  REGION 1..9: note = Description of Artificial Sequence: Synthetic peptide
  REGION 1..9: note = Synthetic Construct
VRTSGTGDY

SEQ ID NO: 2052 - protein, 16 aa, synthetic construct
  REGION 1..16: note = Description of Artificial Sequence: Synthetic peptide
  REGION 1..16: note = Synthetic Construct
RSSQSLVHNNGNTFLH

SEQ ID NO: 2053 - protein, 6 aa, synthetic construct
  REGION 1..6: note = Description of Artificial Sequence: Synthetic peptide
  REGION 1..6: note = Synthetic Construct
VSNRFS

SEQ ID NO: 2054 - protein, 9 aa, synthetic construct
  REGION 1..9: note = Description of Artificial Sequence: Synthetic peptide
  REGION 1..9: note = Synthetic Construct
SQTTHVPPT

SEQ ID NO: 2055 - protein, 122 aa, synthetic construct
  REGION 1..122: note = Description of Artificial Sequence: Synthetic polypeptide
  REGION 1..122: note = Synthetic Construct
QVQLQQSGAELARPGASVKLSCKASGYTFTSYWIQWVKQRPGQGLEWIGTIYPGDGDARYTQKFKGKATLTADKSSSTTYMQLNSLASEDSAVYYCARNGITTAGYYAMDYWGQGTSVTVSS

SEQ ID NO: 2056 - protein, 119 aa, synthetic construct
  REGION 1..119: note = Description of Artificial Sequence: Synthetic polypeptide
  REGION 1..119: note = Synthetic Construct
QVQLQQSGADLLRPGVSVKISCKGSGYTFTDHAMHWVKQSHAESLEWIGVISTYSGDTGYNQKFKGKATMTVDKSSSTAYLELARLTSEDSAIYYCAREGHYDDAMDYWGQGTSVTVSS

SEQ ID NO: 2057 - protein, 119 aa, synthetic construct
  REGION 1..119: note = Description of Artificial Sequence: Synthetic polypeptide
  REGION 1..119: note = Synthetic Construct
EVQLQQSGPELVKPGASVKMSCKASGYTFTSYVMHWVKQKPGQGLEWIGYINPYTDGTKYNEKFKGKATLTSDKSSSTAYMDLSSLTSEDSAVYYCARGEVRRYALDYWGQGTSVTVSS

SEQ ID NO: 2058 - protein, 118 aa, synthetic construct
  REGION 1..118: note = Description of Artificial Sequence: Synthetic polypeptide
  REGION 1..118: note = Synthetic Construct
QVHLQQSGSELRSPGSSVKLSCKDFDSEVFPISYMSWIRQKPGHGFEWIGDILPSIGGRIYGVKFEDRATLDADTVSNTAYLELNSLTSEDSAIYYCARKDYGSLAYWGQGTLVTVSA

SEQ ID NO: 2059 - protein, 122 aa, synthetic construct
  REGION 1..122: note = Description of Artificial Sequence: Synthetic polypeptide
  REGION 1..122: note = Synthetic Construct
EVQLQQSGPELVKPGASVKISCKTSGYTLSEYTMHWVIQSHGKSLEWIGGVIPNSGGTSYNQKFRDKASLTVDKSSSTAYLELRSLTSEDSAVYYCARGDDSYRRGYALDYWGQGTSVTVSS

SEQ ID NO: 2060 - protein, 113 aa, synthetic construct
  REGION 1..113: note = Description of Artificial Sequence: Synthetic polypeptide
  REGION 1..113: note = Synthetic Construct
EVQLQQSGAEVVKPGASVKLSCTASGFNIKDTYMHWVKQRPEQGLEWIGRIDPANGNTKYDPKFQGKATITADTSSNTAYLQLSSLTSEDTAVYYCATLFAYWGQGTLVTVSA

SEQ ID NO: 2061 - protein, 118 aa, synthetic construct
  REGION 1..118: note = Description of Artificial Sequence: Synthetic polypeptide
  REGION 1..118: note = Synthetic Construct
DVQLQESGPGLVKPSQSLSLTCTVTGYSITSDYAWNWIRQFPGNKLEWMGYINYSGRTIYNPSLKSRISITRDTSKNHFFLQLISVTTEDTATYYCARWNGNYGFAYWGQGTLVTVSA

SEQ ID NO: 2062 - protein, 118 aa, synthetic construct
  REGION 1..118: note = Description of Artificial Sequence: Synthetic polypeptide
  REGION 1..118: note = Synthetic Construct
DVQLQESGPGLVKPSQSLSLTCTVTGYSITSDYAWNWIRQFPGNRLEWMGYISFSGSTSYNPSLKSRISITRDTSKNQFFLQLNSVTTEDTATYYCARWNGNYGFAYWGQGTLVTVSA

SEQ ID NO: 2063 - protein, 118 aa, synthetic construct
  REGION 1..118: note = Description of Artificial Sequence: Synthetic polypeptide
  REGION 1..118: note = Synthetic Construct
QVHLQQSGSELRSPGSSVKLSCKDFDSEVFPIAYMSWVRQKPGHGFEWIGDILPSIGRRIYGVKFEDKATLDADTVSNTAYLELNSLTSEDSAIYYCTRKDYGSLAYWGQGTLVTVSA

SEQ ID NO: 2064 - protein, 114 aa, synthetic construct
  REGION 1..114: note = Description of Artificial Sequence: Synthetic polypeptide
  REGION 1..114: note = Synthetic Construct
QVQLKESGPGLVAPSQSLSITCTVSGFSLSRYSVYWVRQPPGKGLEWLGMIWGGGNTDYNSALKSRLSISKDNSKSQVFLKMNSLQTDDSAMYYCVQYGGMDYWGQGTSVTVSS

SEQ ID NO: 2065 - protein, 116 aa, synthetic construct
  REGION 1..116: note = Description of Artificial Sequence: Synthetic polypeptide
  REGION 1..116: note = Synthetic Construct
QVQLQQPGAELVKPGASVKLSCKASGYTFTSYWMHWVKQSPGRGLEWIGRSDPTTGGTNYNEKFKTKATLTVDKPSSTAYMQLSSLTSDDSAVYYCVRTSGTGDYWGQGTSLTVSS

SEQ ID NO: 2066 - protein, 107 aa, synthetic construct
  REGION 1..107: note = Description of Artificial Sequence: Synthetic polypeptide
  REGION 1..107: note = Synthetic Construct
DIQMTQSPASLSVSVGETVTITCRASENIYSNLAWYQQKQGRSPQLLVYAATNLADGVPSRFSGSGSGTQYSLKINSLQSEDFGYYYCQHFWGTPYTFGGGTKVEIK

SEQ ID NO: 2067 - protein, 112 aa, synthetic construct
  REGION 1..112: note = Description of Artificial Sequence: Synthetic polypeptide
  REGION 1..112: note = Synthetic Construct
DVVMTQTPLTLSVTIGQPASFSCKSSQSLLDSDGKTYLNWLLRRPGQSPKRLIYVVSKLDSGVPDRFTGSGSGTDFTLKISRVEAEDLGVYYCWQGTHFPYTFGGGTKLEIK

SEQ ID NO: 2068 - protein, 107 aa, synthetic construct
  REGION 1..107: note = Description of Artificial Sequence: Synthetic polypeptide
  REGION 1..107: note = Synthetic Construct
DIQMTQSSSSFSVSLGDRVTITCKASEDIYNRLAWYQQKPGNAPRLLISGATSLETGVPSRFSGSGSGKDYTLSITSLQTEDVATYYCQQYWSTPWTFGGGTKLEIK

SEQ ID NO: 2069 - protein, 112 aa, synthetic construct
  REGION 1..112: note = Description of Artificial Sequence: Synthetic polypeptide
  REGION 1..112: note = Synthetic Construct
DVVMTQTPLSLPVSLGDQASISCRSSQSLVHINGNTYLQWFLQKPGQSPKLLIYKVSNRFSGVPDRFSGSGSGTAFTLKISRVEAEDLGVYFCSQSTHVPYTFGGGTKLEIK

SEQ ID NO: 2070 - protein, 113 aa, synthetic construct
  REGION 1..113: note = Description of Artificial Sequence: Synthetic polypeptide
  REGION 1..113: note = Synthetic Construct
DIVMSQSPSSLAVSVGEKVTMSCKSSQSLLYSSNQKSYLAWYQQKPGQSPKLLIYWASTRESGVPDRFRGSGSGTDFTLTISSVKAEDLAVYYCQQYFSYPPTFGGGTKLEIK

SEQ ID NO: 2071 - protein, 111 aa, synthetic construct
  REGION 1..111: note = Description of Artificial Sequence: Synthetic polypeptide
  REGION 1..111: note = Synthetic Construct
DIVMTQAAFSNPVTLGTSASISCRSSKSLLHSNGITYLYWYLQKPGQSPQLLIYQMSNLASGVPDRFSSSGSGIDFTLRINRVEAEDVGVYYCAQNLELPTFGSGTKLEIK

SEQ ID NO: 2072 - protein, 112 aa, synthetic construct
  REGION 1..112: note = Description of Artificial Sequence: Synthetic polypeptide
  REGION 1..112: note = Synthetic Construct
DVVMTQNPLSLPVSLGDQASISCRSSQSLVHINGNTYLHWYLQKPGQSPKLLIYKVSNRFSGVPDRFSGSGSGTDFTLKISRVEAEDLGVYFCSQTTHALFTFGSGTKLEIK

SEQ ID NO: 2073 - protein, 112 aa, synthetic construct
  REGION 1..112: note = Description of Artificial Sequence: Synthetic polypeptide
  REGION 1..112: note = Synthetic Construct
DVVMTQTPLSLPVSLGDQASISCRSSQSLVHINGNTYLHWYLQKPGQSPKLLIYKVSNRFSGVPDRFSGSGSGTDFTLKISRVEAEDLGVYFCSQSTHVTFTFGSGTKLEIK

SEQ ID NO: 2074 - protein, 112 aa, synthetic construct
  REGION 1..112: note = Description of Artificial Sequence: Synthetic polypeptide
  REGION 1..112: note = Synthetic Construct
DVVMTQTPLSLPVSLGDQASISCRSSQSLVHINGNTYLQWYLQKPGQSPKLLIYKVSNRFSGVPDRFSGSGSGTDFTLRISRVEAEDLGVYFCSQSTHLPYTFGGGTKLEIK

SEQ ID NO: 2075 - protein, 112 aa, synthetic construct
  REGION 1..112: note = Description of Artificial Sequence: Synthetic polypeptide
  REGION 1..112: note = Synthetic Construct
DVLMTQTPLSLPVSLGDQASISCRSSQSIVHSNGNTYLEWYLQKPGQSPKLLIYKVSNRFSGVPDRFSGSGSGTDFTLKISRVEAEDLGVYYCFQGSHVPYTFGGGTKLEIK

SEQ ID NO: 2076 - protein, 112 aa, synthetic construct
  REGION 1..112: note = Description of Artificial Sequence: Synthetic polypeptide
  REGION 1..112: note = Synthetic Construct
DVVMTQTPLSLPVSLGDQASISCRSSQSLVHNNGNTFLHWYLQKPGQSPKLLIYKVSNRFSGVPDRFSGSGSGTDFTLKISRVEAEDLGVYFCSQTTHVPPTFGGGTKLEIK

SEQ ID NO: 2077 - protein, 10 aa, synthetic construct
  REGION 1..10: note = Description of Artificial Sequence: Synthetic peptide
  REGION 1..10: note = Synthetic Construct
GYTFTSYWMH

SEQ ID NO: 2078 - protein, 17 aa, synthetic construct
  REGION 1..17: note = Description of Artificial Sequence: Synthetic peptide
  REGION 1..17: note = Synthetic Construct
RSDPTTGGTNYNEKFKT

SEQ ID NO: 2079 - protein, 7 aa, synthetic construct
  REGION 1..7: note = Description of Artificial Sequence: Synthetic peptide
  REGION 1..7: note = Synthetic Construct
KVSNRFS

SEQ ID NO: 2080 - protein, 10 aa, synthetic construct
  REGION 1..10: note = Description of Artificial Sequence: Synthetic peptide
  REGION 1..10: note = Synthetic Construct
GYTFTSYWIQ

SEQ ID NO: 2081 - protein, 17 aa, synthetic construct
  REGION 1..17: note = Description of Artificial Sequence: Synthetic peptide
  REGION 1..17: note = Synthetic Construct
TIYPGDGDARYTQKFKG

SEQ ID NO: 2082 - protein, 15 aa, synthetic construct
  REGION 1..15: note = Description of Artificial Sequence: Synthetic peptide
  REGION 1..15: note = Synthetic Construct
ARNGITTAGYYAMDY

SEQ ID NO: 2083 - protein, 11 aa, synthetic construct
  REGION 1..11: note = Description of Artificial Sequence: Synthetic peptide
  REGION 1..11: note = Synthetic Construct
RASENIYSNLA

SEQ ID NO: 2084 - protein, 7 aa, synthetic construct
  REGION 1..7: note = Description of Artificial Sequence: Synthetic peptide
  REGION 1..7: note = Synthetic Construct
AATNLAD

SEQ ID NO: 2085 - protein, 9 aa, synthetic construct
  REGION 1..9: note = Description of Artificial Sequence: Synthetic peptide
  REGION 1..9: note = Synthetic Construct
QHFWGTPYT

SEQ ID NO: 2086 - protein, 10 aa, synthetic construct
  REGION 1..10: note = Description of Artificial Sequence: Synthetic peptide
  REGION 1..10: note = Synthetic Construct
GYTFTDHAMH

SEQ ID NO: 2087 - protein, 17 aa, synthetic construct
  REGION 1..17: note = Description of Artificial Sequence: Synthetic peptide
  REGION 1..17: note = Synthetic Construct
VISTYSGDTGYNQKFKG

SEQ ID NO: 2088 - protein, 12 aa, synthetic construct
  REGION 1..12: note = Description of Artificial Sequence: Synthetic peptide
  REGION 1..12: note = Synthetic Construct
AREGHYDDAMDY

SEQ ID NO: 2089 - protein, 16 aa, synthetic construct
  REGION 1..16: note = Description of Artificial Sequence: Synthetic peptide
  REGION 1..16: note = Synthetic Construct
KSSQSLLDSDGKTYLN

SEQ ID NO: 2090 - protein, 7 aa, synthetic construct
  REGION 1..7: note = Description of Artificial Sequence: Synthetic peptide
  REGION 1..7: note = Synthetic Construct
VVSKLDS

SEQ ID NO: 2091 - protein, 9 aa, synthetic construct
  REGION 1..9: note = Description of Artificial Sequence: Synthetic peptide
  REGION 1..9: note = Synthetic Construct
WQGTHFPYT

SEQ ID NO: 2092 - protein, 10 aa, synthetic construct
  REGION 1..10: note = Description of Artificial Sequence: Synthetic peptide
  REGION 1..10: note = Synthetic Construct
GYTFTSYVMH

SEQ ID NO: 2093 - protein, 17 aa, synthetic construct
  REGION 1..17: note = Description of Artificial Sequence: Synthetic peptide
  REGION 1..17: note = Synthetic Construct
YINPYTDGTKYNEKFKG

SEQ ID NO: 2094 - protein, 12 aa, synthetic construct
  REGION 1..12: note = Description of Artificial Sequence: Synthetic peptide
  REGION 1..12: note = Synthetic Construct
ARGEVRRYALDY

SEQ ID NO: 2095 - protein, 11 aa, synthetic construct
  REGION 1..11: note = Description of Artificial Sequence: Synthetic peptide
  REGION 1..11: note = Synthetic Construct
KASEDIYNRLA

SEQ ID NO: 2096 - protein, 7 aa, synthetic construct
  REGION 1..7: note = Description of Artificial Sequence: Synthetic peptide
  REGION 1..7: note = Synthetic Construct
GATSLET

SEQ ID NO: 2097 - protein, 9 aa, synthetic construct
  REGION 1..9: note = Description of Artificial Sequence: Synthetic peptide
  REGION 1..9: note = Synthetic Construct
QQYWSTPWT

SEQ ID NO: 2098 - protein, 11 aa, synthetic construct
  REGION 1..11: note = Description of Artificial Sequence: Synthetic peptide
  REGION 1..11: note = Synthetic Construct
DSEVFPISYMS

SEQ ID NO: 2099 - protein, 15 aa, synthetic construct
  REGION 1..15: note = Description of Artificial Sequence: Synthetic peptide
  REGION 1..15: note = Synthetic Construct
DILPSIGGRIYGVKF

SEQ ID NO: 2100 - protein, 10 aa, synthetic construct
  REGION 1..10: note = Description of Artificial Sequence: Synthetic peptide
  REGION 1..10: note = Synthetic Construct
ARKDYGSLAY

SEQ ID NO: 2101 - protein, 16 aa, synthetic construct
  REGION 1..16: note = Description of Artificial Sequence: Synthetic peptide
  REGION 1..16: note = Synthetic Construct
RSSQSLVHINGNTYLQ

SEQ ID NO: 2102 - protein, 9 aa, synthetic construct
  REGION 1..9: note = Description of Artificial Sequence: Synthetic peptide
  REGION 1..9: note = Synthetic Construct
SQSTHVPYT

SEQ ID NO: 2103 - protein, 10 aa, synthetic construct
  REGION 1..10: note = Description of Artificial Sequence: Synthetic peptide
  REGION 1..10: note = Synthetic Construct
GYTLSEYTMH

SEQ ID NO: 2104 - protein, 17 aa, synthetic construct
  REGION 1..17: note = Description of Artificial Sequence: Synthetic peptide
  REGION 1..17: note = Synthetic Construct
GVIPNSGGTSYNQKFRD

SEQ ID NO: 2105 - protein, 15 aa, synthetic construct
  REGION 1..15: note = Description of Artificial Sequence: Synthetic peptide
  REGION 1..15: note = Synthetic Construct
ARGDDSYRRGYALDY

SEQ ID NO: 2106 - protein, 17 aa, synthetic construct
  REGION 1..17: note = Description of Artificial Sequence: Synthetic peptide
  REGION 1..17: note = Synthetic Construct
KSSQSLLYSSNQKSYLA

SEQ ID NO: 2107 - protein, 7 aa, synthetic construct
  REGION 1..7: note = Description of Artificial Sequence: Synthetic peptide
  REGION 1..7: note = Synthetic Construct
WASTRES

SEQ ID NO: 2108 - protein, 9 aa, synthetic construct
  REGION 1..9: note = Description of Artificial Sequence: Synthetic peptide
  REGION 1..9: note = Synthetic Construct
QQYFSYPPT

SEQ ID NO: 2109 - protein, 10 aa, synthetic construct
  REGION 1..10: note = Description of Artificial Sequence: Synthetic peptide
  REGION 1..10: note = Synthetic Construct
GFNIKDTYMH

SEQ ID NO: 2110 - protein, 17 aa, synthetic construct
  REGION 1..17: note = Description of Artificial Sequence: Synthetic peptide
  REGION 1..17: note = Synthetic Construct
RIDPANGNTKYDPKFQG

SEQ ID NO: 2111 - protein, 6 aa, synthetic construct
  REGION 1..6: note = Description of Artificial Sequence: Synthetic peptide
  REGION 1..6: note = Synthetic Construct
ATLFAY

SEQ ID NO: 2112 - protein, 16 aa, synthetic construct
  REGION 1..16: note = Description of Artificial Sequence: Synthetic peptide
  REGION 1..16: note = Synthetic Construct
RSSKSLLHSNGITYLY

SEQ ID NO: 2113 - protein, 7 aa, synthetic construct
  REGION 1..7: note = Description of Artificial Sequence: Synthetic peptide
  REGION 1..7: note = Synthetic Construct
QMSNLAS

SEQ ID NO: 2114 - protein, 8 aa, synthetic construct
  REGION 1..8: note = Description of Artificial Sequence: Synthetic peptide
  REGION 1..8: note = Synthetic Construct
AQNLELPT

SEQ ID NO: 2115 - protein, 11 aa, synthetic construct
  REGION 1..11: note = Description of Artificial Sequence: Synthetic peptide
  REGION 1..11: note = Synthetic Construct
GYSITSDYAWN

SEQ ID NO: 2116 - protein, 16 aa, synthetic construct
  REGION 1..16: note = Description of Artificial Sequence: Synthetic peptide
  REGION 1..16: note = Synthetic Construct
YINYSGRTIYNPSLKS

SEQ ID NO: 2117 - protein, 11 aa, synthetic construct
  REGION 1..11: note = Description of Artificial Sequence: Synthetic peptide
  REGION 1..11: note = Synthetic Construct
ARWNGNYGFAY

SEQ ID NO: 2118 - protein, 16 aa, synthetic construct
  REGION 1..16: note = Description of Artificial Sequence: Synthetic peptide
  REGION 1..16: note = Synthetic Construct
RSSQSLVHINGNTYLH

SEQ ID NO: 2119 - protein, 9 aa, synthetic construct
  REGION 1..9: note = Description of Artificial Sequence: Synthetic peptide
  REGION 1..9: note = Synthetic Construct
SQTTHALFT

SEQ ID NO: 2120 - protein, 16 aa, synthetic construct
  REGION 1..16: note = Description of Artificial Sequence: Synthetic peptide
  REGION 1..16: note = Synthetic Construct
YISFSGSTSYNPSLKS

SEQ ID NO: 2121 - protein, 9 aa, synthetic construct
  REGION 1..9: note = Description of Artificial Sequence: Synthetic peptide
  REGION 1..9: note = Synthetic Construct
SQSTHVTFT

SEQ ID NO: 2122 - protein, 11 aa, synthetic construct
  REGION 1..11: note = Description of Artificial Sequence: Synthetic peptide
  REGION 1..11: note = Synthetic Construct
DSEVFPIAYMS

SEQ ID NO: 2123 - protein, 17 aa, synthetic construct
  REGION 1..17: note = Description of Artificial Sequence: Synthetic peptide
  REGION 1..17: note = Synthetic Construct
DILPSIGRRIYGVKFED

SEQ ID NO: 2124 - protein, 8 aa, synthetic construct
  REGION 1..8: note = Description of Artificial Sequence: Synthetic peptide
  REGION 1..8: note = Synthetic Construct
KDYGSLAY

SEQ ID NO: 2125 - protein, 9 aa, synthetic construct
  REGION 1..9: note = Description of Artificial Sequence: Synthetic peptide
  REGION 1..9: note = Synthetic Construct
SQSTHLPYT

SEQ ID NO: 2126 - protein, 10 aa, synthetic construct
  REGION 1..10: note = Description of Artificial Sequence: Synthetic peptide
  REGION 1..10: note = Synthetic Construct
GFSLSRYSVY

SEQ ID NO: 2127 - protein, 16 aa, synthetic construct
  REGION 1..16: note = Description of Artificial Sequence: Synthetic peptide
  REGION 1..16: note = Synthetic Construct
MIWGGGNTDYNSALKS

SEQ ID NO: 2128 - protein, 6 aa, synthetic construct
  REGION 1..6: note = Description of Artificial Sequence: Synthetic peptide
  REGION 1..6: note = Synthetic Construct
YGGMDY

SEQ ID NO: 2129 - protein, 16 aa, synthetic construct
  REGION 1..16: note = Description of Artificial Sequence: Synthetic peptide
  REGION 1..16: note = Synthetic Construct
RSSQSIVHSNGNTYLE

SEQ ID NO: 2130 - protein, 9 aa, synthetic construct
  REGION 1..9: note = Description of Artificial Sequence: Synthetic peptide
  REGION 1..9: note = Synthetic Construct
FQGSHVPYT

SEQ ID NO: 2131 - protein, 223 aa, synthetic construct
  REGION 1..223: note = Description of Artificial Sequence: Synthetic polypeptide
  REGION 1..223: note = Synthetic Construct
QVQLQQPGAELVKPGASVKLSCKASGYTFTSYWMHWVKQSPGRGLEWIGRSDPTTGGTNYNEKFKTKATLTVDKPSSTAYMQLSSLTSDDSAVYYCVRTSGTGDYWGQGTSLTVSSASTKGPSVFPLAPSSKSTSGGTAALGCLVKDYFPEPVTVSWNSGALTSGVHTFPAVLQSSGLYSLSSVVTVPSSSLGTQTYICNVNHKPSNTKVDKKVEPKSCDKTH

SEQ ID NO: 2132 - protein, 446 aa, synthetic construct
  REGION 1..446: note = Description of Artificial Sequence: Synthetic polypeptide
  REGION 1..446: note = Synthetic Construct
QVQLQQPGAELVKPGASVKLSCKASGYTFTSYWMHWVKQSPGRGLEWIGRSDPTTGGTNYNEKFKTKATLTVDKPSSTAYMQLSSLTSDDSAVYYCVRTSGTGDYWGQGTSLTVSSASTKGPSVFPLAPSSKSTSGGTAALGCLVKDYFPEPVTVSWNSGALTSGVHTFPAVLQSSGLYSLSSVVTVPSSSLGTQTYICNVNHKPSNTKVDKKVEPKSCDKTHTCPPCPAPEAAGGPSVFLFPPKPKDTLMISRTPEVTCVVVDVSHEDPEVKFNWYVDGVEVHNAKTKPREEQYNSTYRVVSVLTVLHQDWLNGKEYKCKVSNKALGAPIEKTISKAKGQPREPQVYTLPPSRDELTKNQVSLWCLVKGFYPSDIAVLWESYGTEWASYKTTPPVLDSDGSFFLYSKLTVTKEEWQQGFVFSCSVMHEALHNHYTQKSLSLSPGK

SEQ ID NO: 2133 - protein, 446 aa, synthetic construct
  REGION 1..446: note = Description of Artificial Sequence: Synthetic polypeptide
  REGION 1..446: note = Synthetic Construct
QVQLQQPGAELVKPGASVKLSCKASGYTFTSYWMHWVKQSPGRGLEWIGRSDPTTGGTNYNEKFKTKATLTVDKPSSTAYMQLSSLTSDDSAVYYCVRTSGTGDYWGQGTSLTVSSASTKGPSVFPLAPSSKSTSGGTAALGCLVKDYFPEPVTVSWNSGALTSGVHTFPAVLQSSGLYSLSSVVTVPSSSLGTQTYICNVNHKPSNTKVDKKVEPKSCDKTHTCPPCPAPEAAGGPSVFLFPPKPKDTLMISRTPEVTCVVVDVSHEDPEVKFNWYVDGVEVHNAKTKPREEQYNSTYRVVSVLTVLHQDWLNGKEYKCKVSNKALGAPIEKTISKAKGQPREPQVYTLPPSRDELTKNQVSLSCAVKGFYPSDIAVEWESNGQPENNYKTTPPVLDSDGSFFLVSKLTVDKSRWQQGNVFSCSVMHEALHNHYTQKSLSLSPGK

SEQ ID NO: 2134 - protein, 229 aa, synthetic construct
  REGION 1..229: note = Description of Artificial Sequence: Synthetic polypeptide
  REGION 1..229: note = Synthetic Construct
EVQLQQSGPELVKPGASVKISCKTSGYTLSEYTMHWVIQSHGKSLEWIGGVIPNSGGTSYNQKFRDKASLTVDKSSSTAYLELRSLTSEDSAVYYCARGDDSYRRGYALDYWGQGTSVTVSSASTKGPSVFPLAPSSKSTSGGTAALGCLVKDYFPEPVTVSWNSGALTSGVHTFPAVLQSSGLYSLSSVVTVPSSSLGTQTYICNVNHKPSNTKVDKKVEPKSCDKTH

SEQ ID NO: 2135 - protein, 452 aa, synthetic construct
  REGION 1..452: note = Description of Artificial Sequence: Synthetic polypeptide
  REGION 1..452: note = Synthetic Construct
EVQLQQSGPELVKPGASVKISCKTSGYTLSEYTMHWVIQSHGKSLEWIGGVIPNSGGTSYNQKFRDKASLTVDKSSSTAYLELRSLTSEDSAVYYCARGDDSYRRGYALDYWGQGTSVTVSSASTKGPSVFPLAPSSKSTSGGTAALGCLVKDYFPEPVTVSWNSGALTSGVHTFPAVLQSSGLYSLSSVVTVPSSSLGTQTYICNVNHKPSNTKVDKKVEPKSCDKTHTCPPCPAPEAAGGPSVFLFPPKPKDTLMISRTPEVTCVVVDVSHEDPEVKFNWYVDGVEVHNAKTKPREEQYNSTYRVVSVLTVLHQDWLNGKEYKCKVSNKALGAPIEKTISKAKGQPREPQVYTLPPSRDELTKNQVSLWCLVKGFYPSDIAVLWESYGTEWASYKTTPPVLDSDGSFFLYSKLTVTKEEWQQGFVFSCSVMHEALHNHYTQKSLSLSPGK

SEQ ID NO: 2136 - protein, 452 aa, synthetic construct
  REGION 1..452: note = Description of Artificial Sequence: Synthetic polypeptide
  REGION 1..452: note = Synthetic Construct
EVQLQQSGPELVKPGASVKISCKTSGYTLSEYTMHWVIQSHGKSLEWIGGVIPNSGGTSYNQKFRDKASLTVDKSSSTAYLELRSLTSEDSAVYYCARGDDSYRRGYALDYWGQGTSVTVSSASTKGPSVFPLAPSSKSTSGGTAALGCLVKDYFPEPVTVSWNSGALTSGVHTFPAVLQSSGLYSLSSVVTVPSSSLGTQTYICNVNHKPSNTKVDKKVEPKSCDKTHTCPPCPAPEAAGGPSVFLFPPKPKDTLMISRTPEVTCVVVDVSHEDPEVKFNWYVDGVEVHNAKTKPREEQYNSTYRVVSVLTVLHQDWLNGKEYKCKVSNKALGAPIEKTISKAKGQPREPQVYTLPPSRDELTKNQVSLSCAVKGFYPSDIAVEWESNGQPENNYKTTPPVLDSDGSFFLVSKLTVDKSRWQQGNVFSCSVMHEALHNHYTQKSLSLSPGK

SEQ ID NO: 2137 - protein, 760 aa, Homo sapiens
MMDQARSAFSNLFGGEPLSYTRFSLARQVDGDNSHVEMKLAVDEEENADNNTKANVTKPKRCSGSICYGTIAVIVFFLIGFMIGYLGYCKGVEPKTECERLAGTESPVREEPGEDFPAARRLYWDDLKRKLSEKLDSTDFTGTIKLLNENSYVPREAGSQKDENLALYVENQFREFKLSKVWRDQHFVKIQVKDSAQNSVIIVDKNGRLVYLVENPGGYVAYSKAATVTGKLVHANFGTKKDFEDLYTPVNGSIVIVRAGKITFAEKVANAESLNAIGVLIYMDQTKFPIVNAELSFFGHAHLGTGDPYTPGFPSFNHTQFPPSRSSGLPNIPVQTISRAAAEKLFGNMEGDCPSDWKTDSTCRMVTSESKNVKLTVSNVLKEIKILNIFGVIKGFVEPDHYVVVGAQRDAWGPGAAKSGVGTALLLKLAQMFSDMVLKDGFQPSRSIIFASWSAGDFGSVGATEWLEGYLSSLHLKAFTYINLDKAVLGTSNFKVSASPLLYTLIEKTMQNVKHPVTGQFLYQDSNWASKVEKLTLDNAAFPFLAYSGIPAVSFCFCEDTDYPYLGTTMDTYKELIERIPELNKVARAAAEVAGQFVIKLTHDVELNLDYERYNSQLLSFVRDLNQYRADIKEMGLSLQWLYSARGDFFRATSRLTTDFGNAEKTDRFVMKKLNDRVMRVEYHFLSPYVSPKESPFRHVFWGSGSHTLPALLENLKLRKQNNGAFNETLFRNQLALATWTIQGAANALSGDVWDIDNEF

SEQ ID NO: 2138 - protein, 217 aa, Homo sapiens
APELLGGPSVFLFPPKPKDTLMISRTPEVTCVVVDVSHEDPEVKFNWYVDGVEVHNAKTKPREEQYNSTYRVVSVLTVLHQDWLNGKEYKCKVSNKALPAPIEKTISKAKGQPREPQVYTLPPSRDELTKNQVSLTCLVKGFYPSDIAVEWESNGQPENNYKTTPPVLDSDGSFFLYSKLTVDKSRWQQGNVFSCSVMHEALHNHYTQKSLSLSPGK

SEQ ID NO: 2139 - protein, 15 aa, Homo sapiens
EPKSCDKTHTCPPCP

SEQ ID NO: 2140 - protein, 217 aa, synthetic construct
  REGION 1..217: note = Description of Artificial Sequence: Synthetic polypeptide
  REGION 1..217: note = Synthetic Construct
APELLGGPSVFLFPPKPKDTLMISRTPEVTCVVVDVSHEDPEVKFNWYVDGVEVHNAKTKPREEQYNSTYRVVSVLTVLHQDWLNGKEYKCKVSNKALPAPIEKTISKAKGQPREPQVYTLPPSRDELTKNQVSLTCLVKGFYPSDIAVEWESYGTEWSSYKTTPPVLDSDGSFFLYSKLTVTKEEWQQGFVFSCSVMHEALHNHYTQKSLSLSPGK

SEQ ID NO: 2141 - protein, 217 aa, synthetic construct
  REGION 1..217: note = Description of Artificial Sequence: Synthetic polypeptide
  REGION 1..217: note = Synthetic Construct
APELLGGPSVFLFPPKPKDTLMISRTPEVTCVVVDVSHEDPEVKFNWYVDGVEVHNAKTKPREEQYNSTYRVVSVLTVLHQDWLNGKEYKCKVSNKALPAPIEKTISKAKGQPREPQVYTLPPSRDELTKNQVSLTCLVKGFYPSDIAVWWESYGTEWSSYKTTPPVLDSDGSFFLYSKLTVTKEEWQQGFVFSCSVMHEALHNHYTQKSLSLSPGK

SEQ ID NO: 2142 - protein, 217 aa, synthetic construct
  REGION 1..217: note = Description of Artificial Sequence: Synthetic polypeptide
  REGION 1..217: note = Synthetic Construct
APELLGGPSVFLFPPKPKDTLMISRTPEVTCVVVDVSHEDPEVKFNWYVDGVEVHNAKTKPREEQYNSTYRVVSVLTVLHQDWLNGKEYKCKVSNKALPAPIEKTISKAKGQPREPQVYTLPPSRDELTKNQVSLTCLVKGFYPSDIAVWWESYGTEWSNYKTTPPVLDSDGSFFLYSKLTVTKSEWQQGFVFSCSVMHEALHNHYTQKSLSLSPGK

SEQ ID NO: 2143 - protein, 217 aa, synthetic construct
  REGION 1..217: note = Description of Artificial Sequence: Synthetic polypeptide
  REGION 1..217: note = Synthetic Construct
APELLGGPSVFLFPPKPKDTLMISRTPEVTCVVVDVSHEDPEVKFNWYVDGVEVHNAKTKPREEQYNSTYRVVSVLTVLHQDWLNGKEYKCKVSNKALPAPIEKTISKAKGQPREPQVYTLPPSRDELTKNQVSLTCLVKGFYPSDIAVEWESYGTEWSNYKTTPPVLDSDGSFFLYSKLTVTKEEWQQGFVFSCSVMHEALHNHYTQKSLSLSPGK

SEQ ID NO: 2144 - protein, 217 aa, synthetic construct
  REGION 1..217: note = Description of Artificial Sequence: Synthetic polypeptide
  REGION 1..217: note = Synthetic Construct
APELLGGPSVFLFPPKPKDTLMISRTPEVTCVVVDVSHEDPEVKFNWYVDGVEVHNAKTKPREEQYNSTYRVVSVLTVLHQDWLNGKEYKCKVSNKALPAPIEKTISKAKGQPREPQVYTLPPSRDELTKNQVSLTCLVKGFYPSDIAVWWESYGTEWSNYKTTPPVLDSDGSFFLYSKLTVTKEEWQQGFVFSCSVMHEALHNHYTQKSLSLSPGK

SEQ ID NO: 2145 - protein, 217 aa, synthetic construct
  REGION 1..217: note = Description of Artificial Sequence: Synthetic polypeptide
  REGION 1..217: note = Synthetic Construct
APELLGGPSVFLFPPKPKDTLMISRTPEVTCVVVDVSHEDPEVKFNWYVDGVEVHNAKTKPREEQYNSTYRVVSVLTVLHQDWLNGKEYKCKVSNKALPAPIEKTISKAKGQPREPQVYTLPPSRDELTKNQVSLTCLVKGFYPSDIAVLWESYGTEWSSYKTTPPVLDSDGSFFLYSKLTVTKEEWQQGFVFSCSVMHEALHNHYTQKSLSLSPGK

SEQ ID NO: 2146 - protein, 217 aa, synthetic construct
  REGION 1..217: note = Description of Artificial Sequence: Synthetic polypeptide
  REGION 1..217: note = Synthetic Construct
APELLGGPSVFLFPPKPKDTLMISRTPEVTCVVVDVSHEDPEVKFNWYVDGVEVHNAKTKPREEQYNSTYRVVSVLTVLHQDWLNGKEYKCKVSNKALPAPIEKTISKAKGQPREPQVYTLPPSRDELTKNQVSLTCLVKGFYPSDIAVEWESFGTEWSSYKTTPPVLDSDGSFFLYSKLTVTKEEWQQGFVFSCSVMHEALHNHYTQKSLSLSPGK

SEQ ID NO: 2147 - protein, 217 aa, synthetic construct
  REGION 1..217: note = Description of Artificial Sequence: Synthetic polypeptide
  REGION 1..217: note = Synthetic Construct
APELLGGPSVFLFPPKPKDTLMISRTPEVTCVVVDVSHEDPEVKFNWYVDGVEVHNAKTKPREEQYNSTYRVVSVLTVLHQDWLNGKEYKCKVSNKALPAPIEKTISKAKGQPREPQVYTLPPSRDELTKNQVSLTCLVKGFYPSDIAVEWESYGTEWASYKTTPPVLDSDGSFFLYSKLTVTKEEWQQGFVFSCSVMHEALHNHYTQKSLSLSPGK

SEQ ID NO: 2148 - protein, 217 aa, synthetic construct
  REGION 1..217: note = Description of Artificial Sequence: Synthetic polypeptide
  REGION 1..217: note = Synthetic Construct
APELLGGPSVFLFPPKPKDTLMISRTPEVTCVVVDVSHEDPEVKFNWYVDGVEVHNAKTKPREEQYNSTYRVVSVLTVLHQDWLNGKEYKCKVSNKALPAPIEKTISKAKGQPREPQVYTLPPSRDELTKNQVSLTCLVKGFYPSDIAVEWESYGTEWVSYKTTPPVLDSDGSFFLYSKLTVTKEEWQQGFVFSCSVMHEALHNHYTQKSLSLSPGK

SEQ ID NO: 2149 - protein, 217 aa, synthetic construct
  REGION 1..217: note = Description of Artificial Sequence: Synthetic polypeptide
  REGION 1..217: note = Synthetic Construct
APELLGGPSVFLFPPKPKDTLMISRTPEVTCVVVDVSHEDPEVKFNWYVDGVEVHNAKTKPREEQYNSTYRVVSVLTVLHQDWLNGKEYKCKVSNKALPAPIEKTISKAKGQPREPQVYTLPPSRDELTKNQVSLTCLVKGFYPSDIAVEWESYGTEWSSYKTTPPVLDSDGSFFLYSKLTVSKEEWQQGFVFSCSVMHEALHNHYTQKSLSLSPGK

SEQ ID NO: 2150 - protein, 217 aa, synthetic construct
  REGION 1..217: note = Description of Artificial Sequence: Synthetic polypeptide
  REGION 1..217: note = Synthetic Construct
APELLGGPSVFLFPPKPKDTLMISRTPEVTCVVVDVSHEDPEVKFNWYVDGVEVHNAKTKPREEQYNSTYRVVSVLTVLHQDWLNGKEYKCKVSNKALPAPIEKTISKAKGQPREPQVYTLPPSRDELTKNQVSLTCLVKGFYPSDIAVEWESFGTEWASYKTTPPVLDSDGSFFLYSKLTVTKEEWQQGFVFSCSVMHEALHNHYTQKSLSLSPGK

SEQ ID NO: 2151 - protein, 217 aa, synthetic construct
  REGION 1..217: note = Description of Artificial Sequence: Synthetic polypeptide
  REGION 1..217: note = Synthetic Construct
APELLGGPSVFLFPPKPKDTLMISRTPEVTCVVVDVSHEDPEVKFNWYVDGVEVHNAKTKPREEQYNSTYRVVSVLTVLHQDWLNGKEYKCKVSNKALPAPIEKTISKAKGQPREPQVYTLPPSRDELTKNQVSLTCLVKGFYPSDIAVEWESFGTEWVSYKTTPPVLDSDGSFFLYSKLTVTKEEWQQGFVFSCSVMHEALHNHYTQKSLSLSPGK

SEQ ID NO: 2152 - protein, 217 aa, synthetic construct
  REGION 1..217: note = Description of Artificial Sequence: Synthetic polypeptide
  REGION 1..217: note = Synthetic Construct
APELLGGPSVFLFPPKPKDTLMISRTPEVTCVVVDVSHEDPEVKFNWYVDGVEVHNAKTKPREEQYNSTYRVVSVLTVLHQDWLNGKEYKCKVSNKALPAPIEKTISKAKGQPREPQVYTLPPSRDELTKNQVSLTCLVKGFYPSDIAVWWESFGTEWSSYKTTPPVLDSDGSFFLYSKLTVTKEEWQQGFVFSCSVMHEALHNHYTQKSLSLSPGK

SEQ ID NO: 2153 - protein, 217 aa, synthetic construct
  REGION 1..217: note = Description of Artificial Sequence: Synthetic polypeptide
  REGION 1..217: note = Synthetic Construct
APELLGGPSVFLFPPKPKDTLMISRTPEVTCVVVDVSHEDPEVKFNWYVDGVEVHNAKTKPREEQYNSTYRVVSVLTVLHQDWLNGKEYKCKVSNKALPAPIEKTISKAKGQPREPQVYTLPPSRDELTKNQVSLTCLVKGFYPSDIAVWWESYGTEWASYKTTPPVLDSDGSFFLYSKLTVTKEEWQQGFVFSCSVMHEALHNHYTQKSLSLSPGK

SEQ ID NO: 2154 - protein, 217 aa, synthetic construct
  REGION 1..217: note = Description of Artificial Sequence: Synthetic polypeptide
  REGION 1..217: note = Synthetic Construct
APELLGGPSVFLFPPKPKDTLMISRTPEVTCVVVDVSHEDPEVKFNWYVDGVEVHNAKTKPREEQYNSTYRVVSVLTVLHQDWLNGKEYKCKVSNKALPAPIEKTISKAKGQPREPQVYTLPPSRDELTKNQVSLTCLVKGFYPSDIAVWWESYGTEWVSYKTTPPVLDSDGSFFLYSKLTVTKEEWQQGFVFSCSVMHEALHNHYTQKSLSLSPGK

SEQ ID NO: 2155 - protein, 217 aa, synthetic construct
  REGION 1..217: note = Description of Artificial Sequence: Synthetic polypeptide
  REGION 1..217: note = Synthetic Construct
APELLGGPSVFLFPPKPKDTLMISRTPEVTCVVVDVSHEDPEVKFNWYVDGVEVHNAKTKPREEQYNSTYRVVSVLTVLHQDWLNGKEYKCKVSNKALPAPIEKTISKAKGQPREPQVYTLPPSRDELTKNQVSLTCLVKGFYPSDIAVWWESYGTEWSSYKTTPPVLDSDGSFFLYSKLTVSKEEWQQGFVFSCSVMHEALHNHYTQKSLSLSPGK

SEQ ID NO: 2156 - protein, 217 aa, synthetic construct
  REGION 1..217: note = Description of Artificial Sequence: Synthetic polypeptide
  REGION 1..217: note = Synthetic Construct
APELLGGPSVFLFPPKPKDTLMISRTPEVTCVVVDVSHEDPEVKFNWYVDGVEVHNAKTKPREEQYNSTYRVVSVLTVLHQDWLNGKEYKCKVSNKALPAPIEKTISKAKGQPREPQVYTLPPSRDELTKNQVSLTCLVKGFYPSDIAVWWESFGTEWASYKTTPPVLDSDGSFFLYSKLTVTKEEWQQGFVFSCSVMHEALHNHYTQKSLSLSPGK

SEQ ID NO: 2157 - protein, 217 aa, synthetic construct
  REGION 1..217: note = Description of Artificial Sequence: Synthetic polypeptide
  REGION 1..217: note = Synthetic Construct
APELLGGPSVFLFPPKPKDTLMISRTPEVTCVVVDVSHEDPEVKFNWYVDGVEVHNAKTKPREEQYNSTYRVVSVLTVLHQDWLNGKEYKCKVSNKALPAPIEKTISKAKGQPREPQVYTLPPSRDELTKNQVSLTCLVKGFYPSDIAVWWESFGTEWVSYKTTPPVLDSDGSFFLYSKLTVTKEEWQQGFVFSCSVMHEALHNHYTQKSLSLSPGK

SEQ ID NO: 2158 - protein, 217 aa, synthetic construct
  REGION 1..217: note = Description of Artificial Sequence: Synthetic polypeptide
  REGION 1..217: note = Synthetic Construct
APELLGGPSVFLFPPKPKDTLMISRTPEVTCVVVDVSHEDPEVKFNWYVDGVEVHNAKTKPREEQYNSTYRVVSVLTVLHQDWLNGKEYKCKVSNKALPAPIEKTISKAKGQPREPQVYTLPPSRDELTKNQVSLTCLVKGFYPSDIAVEWESFGTEWSNYKTTPPVLDSDGSFFLYSKLTVTKEEWQQGFVFSCSVMHEALHNHYTQKSLSLSPGK

SEQ ID NO: 2159 - protein, 217 aa, synthetic construct
  REGION 1..217: note = Description of Artificial Sequence: Synthetic polypeptide
  REGION 1..217: note = Synthetic Construct
APELLGGPSVFLFPPKPKDTLMISRTPEVTCVVVDVSHEDPEVKFNWYVDGVEVHNAKTKPREEQYNSTYRVVSVLTVLHQDWLNGKEYKCKVSNKALPAPIEKTISKAKGQPREPQVYTLPPSRDELTKNQVSLTCLVKGFYPSDIAVEWESYGTEWANYKTTPPVLDSDGSFFLYSKLTVTKEEWQQGFVFSCSVMHEALHNHYTQKSLSLSPGK

SEQ ID NO: 2160 - protein, 217 aa, synthetic construct
  REGION 1..217: note = Description of Artificial Sequence: Synthetic polypeptide
  REGION 1..217: note = Synthetic Construct
APELLGGPSVFLFPPKPKDTLMISRTPEVTCVVVDVSHEDPEVKFNWYVDGVEVHNAKTKPREEQYNSTYRVVSVLTVLHQDWLNGKEYKCKVSNKALPAPIEKTISKAKGQPREPQVYTLPPSRDELTKNQVSLTCLVKGFYPSDIAVEWESYGTEWVNYKTTPPVLDSDGSFFLYSKLTVTKEEWQQGFVFSCSVMHEALHNHYTQKSLSLSPGK

SEQ ID NO: 2161 - protein, 217 aa, synthetic construct
  REGION 1..217: note = Description of Artificial Sequence: Synthetic polypeptide
  REGION 1..217: note = Synthetic Construct
APELLGGPSVFLFPPKPKDTLMISRTPEVTCVVVDVSHEDPEVKFNWYVDGVEVHNAKTKPREEQYNSTYRVVSVLTVLHQDWLNGKEYKCKVSNKALPAPIEKTISKAKGQPREPQVYTLPPSRDELTKNQVSLTCLVKGFYPSDIAVEWESYGTEWSNYKTTPPVLDSDGSFFLYSKLTVSKEEWQQGFVFSCSVMHEALHNHYTQKSLSLSPGK

SEQ ID NO: 2162 - protein, 217 aa, synthetic construct
  REGION 1..217: note = Description of Artificial Sequence: Synthetic polypeptide
  REGION 1..217: note = Synthetic Construct
APELLGGPSVFLFPPKPKDTLMISRTPEVTCVVVDVSHEDPEVKFNWYVDGVEVHNAKTKPREEQYNSTYRVVSVLTVLHQDWLNGKEYKCKVSNKALPAPIEKTISKAKGQPREPQVYTLPPSRDELTKNQVSLTCLVKGFYPSDIAVEWESFGTEWANYKTTPPVLDSDGSFFLYSKLTVTKEEWQQGFVFSCSVMHEALHNHYTQKSLSLSPGK

SEQ ID NO: 2163 - protein, 217 aa, synthetic construct
  REGION 1..217: note = Description of Artificial Sequence: Synthetic polypeptide
  REGION 1..217: note = Synthetic Construct
APELLGGPSVFLFPPKPKDTLMISRTPEVTCVVVDVSHEDPEVKFNWYVDGVEVHNAKTKPREEQYNSTYRVVSVLTVLHQDWLNGKEYKCKVSNKALPAPIEKTISKAKGQPREPQVYTLPPSRDELTKNQVSLTCLVKGFYPSDIAVEWESFGTEWVNYKTTPPVLDSDGSFFLYSKLTVTKEEWQQGFVFSCSVMHEALHNHYTQKSLSLSPGK

SEQ ID NO: 2164 - protein, 217 aa, synthetic construct
  REGION 1..217: note = Description of Artificial Sequence: Synthetic polypeptide
  REGION 1..217: note = Synthetic Construct
APELLGGPSVFLFPPKPKDTLMISRTPEVTCVVVDVSHEDPEVKFNWYVDGVEVHNAKTKPREEQYNSTYRVVSVLTVLHQDWLNGKEYKCKVSNKALPAPIEKTISKAKGQPREPQVYTLPPSRDELTKNQVSLTCLVKGFYPSDIAVWWESFGTEWSNYKTTPPVLDSDGSFFLYSKLTVTKEEWQQGFVFSCSVMHEALHNHYTQKSLSLSPGK

SEQ ID NO: 2165 - protein, 217 aa, synthetic construct
  REGION 1..217: note = Description of Artificial Sequence: Synthetic polypeptide
  REGION 1..217: note = Synthetic Construct
APELLGGPSVFLFPPKPKDTLMISRTPEVTCVVVDVSHEDPEVKFNWYVDGVEVHNAKTKPREEQYNSTYRVVSVLTVLHQDWLNGKEYKCKVSNKALPAPIEKTISKAKGQPREPQVYTLPPSRDELTKNQVSLTCLVKGFYPSDIAVWWESYGTEWANYKTTPPVLDSDGSFFLYSKLTVTKEEWQQGFVFSCSVMHEALHNHYTQKSLSLSPGK

SEQ ID NO: 2166 - protein, 217 aa, synthetic construct
  REGION 1..217: note = Description of Artificial Sequence: Synthetic polypeptide
  REGION 1..217: note = Synthetic Construct
APELLGGPSVFLFPPKPKDTLMISRTPEVTCVVVDVSHEDPEVKFNWYVDGVEVHNAKTKPREEQYNSTYRVVSVLTVLHQDWLNGKEYKCKVSNKALPAPIEKTISKAKGQPREPQVYTLPPSRDELTKNQVSLTCLVKGFYPSDIAVWWESYGTEWVNYKTTPPVLDSDGSFFLYSKLTVTKEEWQQGFVFSCSVMHEALHNHYTQKSLSLSPGK

SEQ ID NO: 2167 - protein, 217 aa, synthetic construct
  REGION 1..217: note = Description of Artificial Sequence: Synthetic polypeptide
  REGION 1..217: note = Synthetic Construct
APELLGGPSVFLFPPKPKDTLMISRTPEVTCVVVDVSHEDPEVKFNWYVDGVEVHNAKTKPREEQYNSTYRVVSVLTVLHQDWLNGKEYKCKVSNKALPAPIEKTISKAKGQPREPQVYTLPPSRDELTKNQVSLTCLVKGFYPSDIAVWWESYGTEWSNYKTTPPVLDSDGSFFLYSKLTVSKEEWQQGFVFSCSVMHEALHNHYTQKSLSLSPGK

SEQ ID NO: 2168 - protein, 217 aa, synthetic construct
  REGION 1..217: note = Description of Artificial Sequence: Synthetic polypeptide
  REGION 1..217: note = Synthetic Construct
APELLGGPSVFLFPPKPKDTLMISRTPEVTCVVVDVSHEDPEVKFNWYVDGVEVHNAKTKPREEQYNSTYRVVSVLTVLHQDWLNGKEYKCKVSNKALPAPIEKTISKAKGQPREPQVYTLPPSRDELTKNQVSLTCLVKGFYPSDIAVWWESFGTEWANYKTTPPVLDSDGSFFLYSKLTVTKEEWQQGFVFSCSVMHEALHNHYTQKSLSLSPGK

SEQ ID NO: 2169 - protein, 217 aa, synthetic construct
  REGION 1..217: note = Description of Artificial Sequence: Synthetic polypeptide
  REGION 1..217: note = Synthetic Construct
APELLGGPSVFLFPPKPKDTLMISRTPEVTCVVVDVSHEDPEVKFNWYVDGVEVHNAKTKPREEQYNSTYRVVSVLTVLHQDWLNGKEYKCKVSNKALPAPIEKTISKAKGQPREPQVYTLPPSRDELTKNQVSLTCLVKGFYPSDIAVWWESFGTEWVNYKTTPPVLDSDGSFFLYSKLTVTKEEWQQGFVFSCSVMHEALHNHYTQKSLSLSPGK

SEQ ID NO: 2170 - protein, 217 aa, synthetic construct
  REGION 1..217: note = Description of Artificial Sequence: Synthetic polypeptide
  REGION 1..217: note = Synthetic Construct
APELLGGPSVFLFPPKPKDTLMISRTPEVTCVVVDVSHEDPEVKFNWYVDGVEVHNAKTKPREEQYNSTYRVVSVLTVLHQDWLNGKEYKCKVSNKALPAPIEKTISKAKGQPREPQVYTLPPSRDELTKNQVSLTCLVKGFYPSDIAVLWESFGTEWSSYKTTPPVLDSDGSFFLYSKLTVTKEEWQQGFVFSCSVMHEALHNHYTQKSLSLSPGK

SEQ ID NO: 2171 - protein, 217 aa, synthetic construct
  REGION 1..217: note = Description of Artificial Sequence: Synthetic polypeptide
  REGION 1..217: note = Synthetic Construct
APELLGGPSVFLFPPKPKDTLMISRTPEVTCVVVDVSHEDPEVKFNWYVDGVEVHNAKTKPREEQYNSTYRVVSVLTVLHQDWLNGKEYKCKVSNKALPAPIEKTISKAKGQPREPQVYTLPPSRDELTKNQVSLTCLVKGFYPSDIAVLWESYGTEWASYKTTPPVLDSDGSFFLYSKLTVTKEEWQQGFVFSCSVMHEALHNHYTQKSLSLSPGK

SEQ ID NO: 2172 - protein, 217 aa, synthetic construct
  REGION 1..217: note = Description of Artificial Sequence: Synthetic polypeptide
  REGION 1..217: note = Synthetic Construct
APELLGGPSVFLFPPKPKDTLMISRTPEVTCVVVDVSHEDPEVKFNWYVDGVEVHNAKTKPREEQYNSTYRVVSVLTVLHQDWLNGKEYKCKVSNKALPAPIEKTISKAKGQPREPQVYTLPPSRDELTKNQVSLTCLVKGFYPSDIAVLWESYGTEWVSYKTTPPVLDSDGSFFLYSKLTVTKEEWQQGFVFSCSVMHEALHNHYTQKSLSLSPGK

SEQ ID NO: 2173 - protein, 217 aa, synthetic construct
  REGION 1..217: note = Description of Artificial Sequence: Synthetic polypeptide
  REGION 1..217: note = Synthetic Construct
APELLGGPSVFLFPPKPKDTLMISRTPEVTCVVVDVSHEDPEVKFNWYVDGVEVHNAKTKPREEQYNSTYRVVSVLTVLHQDWLNGKEYKCKVSNKALPAPIEKTISKAKGQPREPQVYTLPPSRDELTKNQVSLTCLVKGFYPSDIAVLWESYGTEWSSYKTTPPVLDSDGSFFLYSKLTVSKEEWQQGFVFSCSVMHEALHNHYTQKSLSLSPGK

SEQ ID NO: 2174 - protein, 217 aa, synthetic construct
  REGION 1..217: note = Description of Artificial Sequence: Synthetic polypeptide
  REGION 1..217: note = Synthetic Construct
APELLGGPSVFLFPPKPKDTLMISRTPEVTCVVVDVSHEDPEVKFNWYVDGVEVHNAKTKPREEQYNSTYRVVSVLTVLHQDWLNGKEYKCKVSNKALPAPIEKTISKAKGQPREPQVYTLPPSRDELTKNQVSLTCLVKGFYPSDIAVLWESFGTEWASYKTTPPVLDSDGSFFLYSKLTVTKEEWQQGFVFSCSVMHEALHNHYTQKSLSLSPGK

SEQ ID NO: 2175 - protein, 217 aa, synthetic construct
  REGION 1..217: note = Description of Artificial Sequence: Synthetic polypeptide
  REGION 1..217: note = Synthetic Construct
APELLGGPSVFLFPPKPKDTLMISRTPEVTCVVVDVSHEDPEVKFNWYVDGVEVHNAKTKPREEQYNSTYRVVSVLTVLHQDWLNGKEYKCKVSNKALPAPIEKTISKAKGQPREPQVYTLPPSRDELTKNQVSLTCLVKGFYPSDIAVLWESFGTEWVSYKTTPPVLDSDGSFFLYSKLTVTKEEWQQGFVFSCSVMHEALHNHYTQKSLSLSPGK

SEQ ID NO: 2176 - protein, 217 aa, synthetic construct
  REGION 1..217: note = Description of Artificial Sequence: Synthetic polypeptide
  REGION 1..217: note = Synthetic Construct
APELLGGPSVFLFPPKPKDTLMISRTPEVTCVVVDVSHEDPEVKFNWYVDGVEVHNAKTKPREEQYNSTYRVVSVLTVLHQDWLNGKEYKCKVSNKALPAPIEKTISKAKGQPREPQVYTLPPSRDELTKNQVSLTCLVKGFYPSDIAVEWESYGTEWSNYKTTPPVLDSDGSFFLYSKLTVTKSEWQQGFVFSCSVMHEALHNHYTQKSLSLSPGK

SEQ ID NO: 2177 - protein, 217 aa, synthetic construct
  REGION 1..217: note = Description of Artificial Sequence: Synthetic polypeptide
  REGION 1..217: note = Synthetic Construct
APELLGGPSVFLFPPKPKDTLMISRTPEVTCVVVDVSHEDPEVKFNWYVDGVEVHNAKTKPREEQYNSTYRVVSVLTVLHQDWLNGKEYKCKVSNKALPAPIEKTISKAKGQPREPQVYTLPPSRDELTKNQVSLTCLVKGFYPSDIAVEWESLGLVWVGYKTTPPVLDSDGSFFLYSKLTVAKSTWQQGWVFSCSVMHEALHNHYTQKSLSLSPGK

SEQ ID NO: 2178 - protein, 217 aa, synthetic construct
  REGION 1..217: note = Description of Artificial Sequence: Synthetic polypeptide
  REGION 1..217: note = Synthetic Construct
APELLGGPSVFLFPPKPKDTLMISRTPEVTCVVVDVSHEDPEVKFNWYVDGVEVHNAKTKPREEQYNSTYRVVSVLTVLHQDWLNGKEYKCKVSNKALPAPIEKTISKAKGQPREPQVYTLPPSRDELTKNQVSLTCLVKGFYPSDIAVEWESYGTVWSHYKTTPPVLDSDGSFFLYSKLTVSKSEWQQGYVFSCSVMHEALHNHYTQKSLSLSPGK

SEQ ID NO: 2179 - protein, 217 aa, synthetic construct
  REGION 1..217: note = Description of Artificial Sequence: Synthetic polypeptide
  REGION 1..217: note = Synthetic Construct
APELLGGPSVFLFPPKPKDTLMISRTPEVTCVVVDVSHEDPEVKFNWYVDGVEVHNAKTKPREEQYNSTYRVVSVLTVLHQDWLNGKEYKCKVSNKALPAPIEKTISKAKGQPREPQVYTLPPSRDELTKNQVSLTCLVKGFYPSDIAVEWESYGTEWSQYKTTPPVLDSDGSFFLYSKLTVEKSDWQQGHVFSCSVMHEALHNHYTQKSLSLSPGK

SEQ ID NO: 2180 - protein, 217 aa, synthetic construct
  REGION 1..217: note = Description of Artificial Sequence: Synthetic polypeptide
  REGION 1..217: note = Synthetic Construct
APELLGGPSVFLFPPKPKDTLMISRTPEVTCVVVDVSHEDPEVKFNWYVDGVEVHNAKTKPREEQYNSTYRVVSVLTVLHQDWLNGKEYKCKVSNKALPAPIEKTISKAKGQPREPQVYTLPPSRDELTKNQVSLTCLVKGFYPSDIAVEWESVGTPWALYKTTPPVLDSDGSFFLYSKLTVLKSEWQQGWVFSCSVMHEALHNHYTQKSLSLSPGK

SEQ ID NO: 2181 - protein, 217 aa, synthetic construct
  REGION 1..217: note = Description of Artificial Sequence: Synthetic polypeptide
  REGION 1..217: note = Synthetic Construct
APELLGGPSVFLFPPKPKDTLMISRTPEVTCVVVDVSHEDPEVKFNWYVDGVEVHNAKTKPREEQYNSTYRVVSVLTVLHQDWLNGKEYKCKVSNKALPAPIEKTISKAKGQPREPQVYTLPPSRDELTKNQVSLTCLVKGFYPSDIAVEWESYGTVWSKYKTTPPVLDSDGSFFLYSKLTVSKSEWQQGFVFSCSVMHEALHNHYTQKSLSLSPGK

SEQ ID NO: 2182 - protein, 217 aa, synthetic construct
  REGION 1..217: note = Description of Artificial Sequence: Synthetic polypeptide
  REGION 1..217: note = Synthetic Construct
APELLGGPSVFLFPPKPKDTLMISRTPEVTCVVVDVSHEDPEVKFNWYVDGVEVHNAKTKPREEQYNSTYRVVSVLTVLHQDWLNGKEYKCKVSNKALPAPIEKTISKAKGQPREPQVYTLPPSRDELTKNQVSLTCLVKGFYPSDIAVEWESLGHVWAVYKTTPPVLDSDGSFFLYSKLTVPKSTWQQGWVFSCSVMHEALHNHYTQKSLSLSPGK

SEQ ID NO: 2183 - protein, 217 aa, synthetic construct
  REGION 1..217: note = Description of Artificial Sequence: Synthetic polypeptide
  REGION 1..217: note = Synthetic Construct
APELLGGPSVFLFPPKPKDTLMISRTPEVTCVVVDVSHEDPEVKFNWYVDGVEVHNAKTKPREEQYNSTYRVVSVLTVLHQDWLNGKEYKCKVSNKALPAPIEKTISKAKGQPREPQVYTLPPSRDELTKNQVSLTCLVKGFYPSDIAVEWESLGLVWVGYKTTPPVLDSDGSFFLYSKLTVPKSTWQQGWVFSCSVMHEALHNHYTQKSLSLSPGK

SEQ ID NO: 2184 - protein, 217 aa, synthetic construct
  REGION 1..217: note = Description of Artificial Sequence: Synthetic polypeptide
  REGION 1..217: note = Synthetic Construct
APELLGGPSVFLFPPKPKDTLMISRTPEVTCVVVDVSHEDPEVKFNWYVDGVEVHNAKTKPREEQYNSTYRVVSVLTVLHQDWLNGKEYKCKVSNKALPAPIEKTISKAKGQPREPQVYTLPPSRDELTKNQVSLTCLVKGFYPSDIAVEWESMGHVWVGYKTTPPVLDSDGSFFLYSKLTVDKSTWQQGWVFSCSVMHEALHNHYTQKSLSLSPGK

SEQ ID NO: 2185 - protein, 217 aa, synthetic construct
  REGION 1..217: note = Description of Artificial Sequence: Synthetic polypeptide
  REGION 1..217: note = Synthetic Construct
APELLGGPSVFLFPPKPKDTLMISRTPEVTCVVVDVSHEDPEVKFNWYVDGVEVHNAKTKPREEQYNSTYRVVSVLTVLHQDWLNGKEYKCKVSNKALPAPIEKTISKAKGQPREPQVYTLPPSRDELTKNQVSLTCLVKGFYPSDIAVEWESLGLVWVFSKTTPPVLDSDGSFFLYSKLTVPKSTWQQGWVFSCSVMHEALHNHYTQKSLSLSPGK

SEQ ID NO: 2186 - protein, 217 aa, synthetic construct
  REGION 1..217: note = Description of Artificial Sequence: Synthetic polypeptide
  REGION 1..217: note = Synthetic Construct
APELLGGPSVFLFPPKPKDTLMISRTPEVTCVVVDVSHEDPEVKFNWYVDGVEVHNAKTKPREEQYNSTYRVVSVLTVLHQDWLNGKEYKCKVSNKALPAPIEKTISKAKGQPREPQVYTLPPSRDELTKNQVSLTCLVKGFYPSDIAVEWESYGTEWSSYKTTPPVLDSDGSFFLYSKLTVTKSEWQQGFVFSCSVMHEALHNHYTQKSLSLSPGK

SEQ ID NO: 2187 - protein, 217 aa, synthetic construct
  REGION 1..217: note = Description of Artificial Sequence: Synthetic polypeptide
  REGION 1..217: note = Synthetic Construct
APELLGGPSVFLFPPKPKDTLMISRTPEVTCVVVDVSHEDPEVKFNWYVDGVEVHNAKTKPREEQYNSTYRVVSVLTVLHQDWLNGKEYKCKVSNKALPAPIEKTISKAKGQPREPQVYTLPPSRDELTKNQVSLTCLVKGFYPSDIAVEWESYGTEWSNYKTTPPVLDSDGSFFLYSKLTVSKSEWQQGFVFSCSVMHEALHNHYTQKSLSLSPGK

SEQ ID NO: 2188 - protein, 217 aa, synthetic construct
  REGION 1..217: note = Description of Artificial Sequence: Synthetic polypeptide
  REGION 1..217: note = Synthetic Construct
APELLGGPSVFLFPPKPKDTLMISRTPEVTCVVVDVSHEDPEVKFNWYVDGVEVHNAKTKPREEQYNSTYRVVSVLTVLHQDWLNGKEYKCKVSNKALPAPIEKTISKAKGQPREPQVYTLPPSRDELTKNQVSLTCLVKGFYPSDIAVEWESLGHVWVGYKTTPPVLDSDGSFFLYSKLTVSKSEWQQGWVFSCSVMHEALHNHYTQKSLSLSPGK

SEQ ID NO: 2189 - protein, 217 aa, synthetic construct
  REGION 1..217: note = Description of Artificial Sequence: Synthetic polypeptide
  REGION 1..217: note = Synthetic Construct
APELLGGPSVFLFPPKPKDTLMISRTPEVTCVVVDVSHEDPEVKFNWYVDGVEVHNAKTKPREEQYNSTYRVVSVLTVLHQDWLNGKEYKCKVSNKALPAPIEKTISKAKGQPREPQVYTLPPSRDELTKNQVSLTCLVKGFYPSDIAVEWESLGHVWVATKTTPPVLDSDGSFFLYSKLTVPKSTWQQGWVFSCSVMHEALHNHYTQKSLSLSPGK

SEQ ID NO: 2190 - protein, 217 aa, synthetic construct
  REGION 1..217: note = Description of Artificial Sequence: Synthetic polypeptide
  REGION 1..217: note = Synthetic Construct
APELLGGPSVFLFPPKPKDTLMISRTPEVTCVVVDVSHEDPEVKFNWYVDGVEVHNAKTKPREEQYNSTYRVVSVLTVLHQDWLNGKEYKCKVSNKALPAPIEKTISKAKGQPREPQVYTLPPSRDELTKNQVSLTCLVKGFYPSDIAVEWESLGPVWVHTKTTPPVLDSDGSFFLYSKLTVPKSTWQQGWVFSCSVMHEALHNHYTQKSLSLSPGK

SEQ ID NO: 2191 - protein, 217 aa, synthetic construct
  REGION 1..217: note = Description of Artificial Sequence: Synthetic polypeptide
  REGION 1..217: note = Synthetic Construct
APELLGGPSVFLFPPKPKDTLMISRTPEVTCVVVDVSHEDPEVKFNWYVDGVEVHNAKTKPREEQYNSTYRVVSVLTVLHQDWLNGKEYKCKVSNKALPAPIEKTISKAKGQPREPQVYTLPPSRDELTKNQVSLTCLVKGFYPSDIAVEWESLGHVWVDQKTTPPVLDSDGSFFLYSKLTVPKSTWQQGWVFSCSVMHEALHNHYTQKSLSLSPGK

SEQ ID NO: 2192 - protein, 217 aa, synthetic construct
  REGION 1..217: note = Description of Artificial Sequence: Synthetic polypeptide
  REGION 1..217: note = Synthetic Construct
APELLGGPSVFLFPPKPKDTLMISRTPEVTCVVVDVSHEDPEVKFNWYVDGVEVHNAKTKPREEQYNSTYRVVSVLTVLHQDWLNGKEYKCKVSNKALPAPIEKTISKAKGQPREPQVYTLPPSRDELTKNQVSLTCLVKGFYPSDIAVEWESLGHVWVNQKTTPPVLDSDGSFFLYSKLTVPKSTWQQGWVFSCSVMHEALHNHYTQKSLSLSPGK

SEQ ID NO: 2193 - protein, 217 aa, synthetic construct
  REGION 1..217: note = Description of Artificial Sequence: Synthetic polypeptide
  REGION 1..217: note = Synthetic Construct
APELLGGPSVFLFPPKPKDTLMISRTPEVTCVVVDVSHEDPEVKFNWYVDGVEVHNAKTKPREEQYNSTYRVVSVLTVLHQDWLNGKEYKCKVSNKALPAPIEKTISKAKGQPREPQVYTLPPSRDELTKNQVSLTCLVKGFYPSDIAVEWESLGHVWVNFKTTPPVLDSDGSFFLYSKLTVPKSTWQQGWVFSCSVMHEALHNHYTQKSLSLSPGK

SEQ ID NO: 2194 - protein, 217 aa, synthetic construct
  REGION 1..217: note = Description of Artificial Sequence: Synthetic polypeptide
  REGION 1..217: note = Synthetic Construct
APELLGGPSVFLFPPKPKDTLMISRTPEVTCVVVDVSHEDPEVKFNWYVDGVEVHNAKTKPREEQYNSTYRVVSVLTVLHQDWLNGKEYKCKVSNKALPAPIEKTISKAKGQPREPQVYTLPPSRDELTKNQVSLTCLVKGFYPSDIAVWWESLGHVWAVYKTTPPVLDSDGSFFLYSKLTVPKSTWQQGWVFSCSVMHEALHNHYTQKSLSLSPGK

SEQ ID NO: 2195 - protein, 217 aa, synthetic construct
  REGION 1..217: note = Description of Artificial Sequence: Synthetic polypeptide
  REGION 1..217: note = Synthetic Construct
APELLGGPSVFLFPPKPKDTLMISRTPEVTCVVVDVSHEDPEVKFNWYVDGVEVHNAKTKPREEQYNSTYRVVSVLTVLHQDWLNGKEYKCKVSNKALPAPIEKTISKAKGQPREPQVYTLPPSRDELTKNQVSLTCLVKGFYPSDIAVLWESLGHVWAVYKTTPPVLDSDGSFFLYSKLTVPKSTWQQGWVFSCSVMHEALHNHYTQKSLSLSPGK

SEQ ID NO: 2196 - protein, 217 aa, synthetic construct
  REGION 1..217: note = Description of Artificial Sequence: Synthetic polypeptide
  REGION 1..217: note = Synthetic Construct
APELLGGPSVFLFPPKPKDTLMISRTPEVTCVVVDVSHEDPEVKFNWYVDGVEVHNAKTKPREEQYNSTYRVVSVLTVLHQDWLNGKEYKCKVSNKALPAPIEKTISKAKGQPREPQVYTLPPSRDELTKNQVSLTCLVKGFYPSDIAVYWESLGHVWAVYKTTPPVLDSDGSFFLYSKLTVPKSTWQQGWVFSCSVMHEALHNHYTQKSLSLSPGK

SEQ ID NO: 2197 - protein, 217 aa, synthetic construct
  REGION 1..217: note = Description of Artificial Sequence: Synthetic polypeptide
  REGION 1..217: note = Synthetic Construct
APELLGGPSVFLFPPKPKDTLMISRTPEVTCVVVDVSHEDPEVKFNWYVDGVEVHNAKTKPREEQYNSTYRVVSVLTVLHQDWLNGKEYKCKVSNKALPAPIEKTISKAKGQPREPQVYTLPPSRDELTKNQVSLTCLVKGFYPSDIAVEWESLGHVWAVYQTTPPVLDSDGSFFLYSKLTVPKSTWQQGWVFSCSVMHEALHNHYTQKSLSLSPGK

SEQ ID NO: 2198 - protein, 217 aa, synthetic construct
  REGION 1..217: note = Description of Artificial Sequence: Synthetic polypeptide
  REGION 1..217: note = Synthetic Construct
APELLGGPSVFLFPPKPKDTLMISRTPEVTCVVVDVSHEDPEVKFNWYVDGVEVHNAKTKPREEQYNSTYRVVSVLTVLHQDWLNGKEYKCKVSNKALPAPIEKTISKAKGQPREPQVYTLPPSRDELTKNQVSLTCLVKGFYPSDIAVEWESLGHVWAVYFTTPPVLDSDGSFFLYSKLTVPKSTWQQGWVFSCSVMHEALHNHYTQKSLSLSPGK

SEQ ID NO: 2199 - protein, 217 aa, synthetic construct
  REGION 1..217: note = Description of Artificial Sequence: Synthetic polypeptide
  REGION 1..217: note = Synthetic Construct
APELLGGPSVFLFPPKPKDTLMISRTPEVTCVVVDVSHEDPEVKFNWYVDGVEVHNAKTKPREEQYNSTYRVVSVLTVLHQDWLNGKEYKCKVSNKALPAPIEKTISKAKGQPREPQVYTLPPSRDELTKNQVSLTCLVKGFYPSDIAVEWESLGHVWAVYHTTPPVLDSDGSFFLYSKLTVPKSTWQQGWVFSCSVMHEALHNHYTQKSLSLSPGK

SEQ ID NO: 2200 - protein, 217 aa, synthetic construct; identical to SEQ ID NO: 2194
  REGION 1..217: note = Description of Artificial Sequence: Synthetic polypeptide
  REGION 1..217: note = Synthetic Construct

SEQ ID NO: 2201 - protein, 217 aa, synthetic construct; identical to SEQ ID NO: 2197
  REGION 1..217: note = Description of Artificial Sequence: Synthetic polypeptide
  REGION 1..217: note = Synthetic Construct

SEQ ID NO: 2202 - protein, 217 aa, synthetic construct
  REGION 1..217: note = Description of Artificial Sequence: Synthetic polypeptide
  REGION 1..217: note = Synthetic Construct
APELLGGPSVFLFPPKPKDTLMISRTPEVTCVVVDVSHEDPEVKFNWYVDGVEVHNAKTKPREEQYNSTYRVVSVLTVLHQDWLNGKEYKCKVSNKALPAPIEKTISKAKGQPREPQVYTLPPSRDELTKNQVSLTCLVKGFYPSDIAVWWESLGHVWAVYQTTPPVLDSDGSFFLYSKLTVPKSTWQQGWVFSCSVMHEALHNHYTQKSLSLSPGK

SEQ ID NO: 2203 - protein, 217 aa, synthetic construct
  REGION 1..217: note = Description of Artificial Sequence: Synthetic polypeptide
  REGION 1..217: note = Synthetic Construct
APELLGGPSVFLFPPKPKDTLMISRTPEVTCVVVDVSHEDPEVKFNWYVDGVEVHNAKTKPREEQYNSTYRVVSVLTVLHQDWLNGKEYKCKVSNKALPAPIEKTISKAKGQPREPQVYTLPPSRDELTKNQVSLTCLVKGFYPSDIAVWWESLGHVWVNQKTTPPVLDSDGSFFLYSKLTVPKSTWQQGWVFSCSVMHEALHNHYTQKSLSLSPGK

SEQ ID NO: 2204 - protein, 217 aa, synthetic construct
  REGION 1..217: note = Description of Artificial Sequence: Synthetic polypeptide
  REGION 1..217: note = Synthetic Construct
APELLGGPSVFLFPPKPKDTLMISRTPEVTCVVVDVSHEDPEVKFNWYVDGVEVHNAKTKPREEQYNSTYRVVSVLTVLHQDWLNGKEYKCKVSNKALPAPIEKTISKAKGQPREPQVYTLPPSRDELTKNQVSLTCLVKGFYPSDIAVEWESLGHVWVNQQTTPPVLDSDGSFFLYSKLTVPKSTWQQGWVFSCSVMHEALHNHYTQKSLSLSPGK

SEQ ID NO: 2205 - protein, 217 aa, synthetic construct
  REGION 1..217: note = Description of Artificial Sequence: Synthetic polypeptide
  REGION 1..217: note = Synthetic Construct
APELLGGPSVFLFPPKPKDTLMISRTPEVTCVVVDVSHEDPEVKFNWYVDGVEVHNAKTKPREEQYNSTYRVVSVLTVLHQDWLNGKEYKCKVSNKALPAPIEKTISKAKGQPREPQVYTLPPSRDELTKNQVSLTCLVKGFYPSDIAVWWESLGHVWVNQQTTPPVLDSDGSFFLYSKLTVPKSTWQQGWVFSCSVMHEALHNHYTQKSLSLSPGK

SEQ ID NO: 2206 - protein, 217 aa, synthetic construct
  REGION 1..217: note = Description of Artificial Sequence: Synthetic polypeptide
  REGION 1..217: note = Synthetic Construct
APELLGGPSVFLFPPKPKDTLMISRTPEVTCVVVDVSHEDPEVKFNWYVDGVEVHNAKTKPREEQYNSTYRVVSVLTVLHQDWLNGKEYKCKVSNKALPAPIEKTISKAKGQPREPQVYTLPPSRDELTKNQVSLTCLVKGFYPSDIAVWWESYGTEWSSYKTTPPVLDSDGSFFLYSKLTVTKSEWQQGFVFSCSVMHEALHNHYTQKSLSLSPGK

SEQ ID NO: 2207 - protein, 217 aa, synthetic construct
  REGION 1..217: note = Description of Artificial Sequence: Synthetic polypeptide
  REGION 1..217: note = Synthetic Construct
APELLGGPSVFLFPPKPKDTLMISRTPEVTCVVVDVSHEDPEVKFNWYVDGVEVHNAKTKPREEQYNSTYRVVSVLTVLHQDWLNGKEYKCKVSNKALPAPIEKTISKAKGQPREPQVYTLPPSRDELTKNQVSLTCLVKGFYPSDIAVEWESYGTEWSSYQTTPPVLDSDGSFFLYSKLTVTKSEWQQGFVFSCSVMHEALHNHYTQKSLSLSPGK

SEQ ID NO: 2208 - protein, 217 aa, synthetic construct
  REGION 1..217: note = Description of Artificial Sequence: Synthetic polypeptide
  REGION 1..217: note = Synthetic Construct
APELLGGPSVFLFPPKPKDTLMISRTPEVTCVVVDVSHEDPEVKFNWYVDGVEVHNAKTKPREEQYNSTYRVVSVLTVLHQDWLNGKEYKCKVSNKALPAPIEKTISKAKGQPREPQVYTLPPSRDELTKNQVSLTCLVKGFYPSDIAVEWESYGTEWSNYQTTPPVLDSDGSFFLYSKLTVTKSEWQQGFVFSCSVMHEALHNHYTQKSLSLSPGK

SEQ ID NO: 2209 - protein, 217 aa, synthetic construct
  REGION 1..217: note = Description of Artificial Sequence: Synthetic polypeptide
  REGION 1..217: note = Synthetic Construct
APELLGGPSVFLFPPKPKDTLMISRTPEVTCVVVDVSHEDPEVKFNWYVDGVEVHNAKTKPREEQYNSTYRVVSVLTVLHQDWLNGKEYKCKVSNKALPAPIEKTISKAKGQPREPQVYTLPPSRDELTKNQVSLTCLVKGFYPSDIAVLWESYGTEWSSYKTTPPVLDSDGSFFLYSKLTVTKSEWQQGFVFSCSVMHEALHNHYTQKSLSLSPGK

SEQ ID NO: 2210 - protein, 217 aa, synthetic construct
  REGION 1..217: note = Description of Artificial Sequence: Synthetic polypeptide
  REGION 1..217: note = Synthetic Construct
APELLGGPSVFLFPPKPKDTLMISRTPEVTCVVVDVSHEDPEVKFNWYVDGVEVHNAKTKPREEQYNSTYRVVSVLTVLHQDWLNGKEYKCKVSNKALPAPIEKTISKAKGQPREPQVYTLPPSRDELTKNQVSLTCLVKGFYPSDIAVLWESYGTEWSSYRTTPPVLDSDGSFFLYSKLTVTKSEWQQGFVFSCSVMHEALHNHYTQKSLSLSPGK

SEQ ID NO: 2211 - protein, 217 aa, synthetic construct
  REGION 1..217: note = Description of Artificial Sequence: Synthetic polypeptide
  REGION 1..217: note = Synthetic Construct
APELLGGPSVFLFPPKPKDTLMISRTPEVTCVVVDVSHEDPEVKFNWYVDGVEVHNAKTKPREEQYNSTYRVVSVLTVLHQDWLNGKEYKCKVSNKALPAPIEKTISKAKGQPREPQVYTLPPSRDELTKNQVSLTCLVKGFYPSDIAVLWESYGTEWSSYRTTPPVLDSDGSFFLYSKLTVTREEWQQGFVFSCSVMHEALHNHYTQKSLSLSPGK

SEQ ID NO: 2212 - protein, 217 aa, synthetic construct
  REGION 1..217: note = Description of Artificial Sequence: Synthetic polypeptide
  REGION 1..217: note = Synthetic Construct
APELLGGPSVFLFPPKPKDTLMISRTPEVTCVVVDVSHEDPEVKFNWYVDGVEVHNAKTKPREEQYNSTYRVVSVLTVLHQDWLNGKEYKCKVSNKALPAPIEKTISKAKGQPREPQVYTLPPSRDELTKNQVSLTCLVKGFYPSDIAVLWESYGTEWSSYRTTPPVLDSDGSFFLYSKLTVTGEEWQQGFVFSCSVMHEALHNHYTQKSLSLSPGK

SEQ ID NO: 2213 - protein, 217 aa, synthetic construct
  REGION 1..217: note = Description of Artificial Sequence: Synthetic polypeptide
  REGION 1..217: note = Synthetic Construct
APELLGGPSVFLFPPKPKDTLMISRTPEVTCVVVDVSHEDPEVKFNWYVDGVEVHNAKTKPREEQYNSTYRVVSVLTVLHQDWLNGKEYKCKVSNKALPAPIEKTISKAKGQPREPQVYTLPPSRDELTKNQVSLTCLVKGFYPSDIAVLWESYGTEWSSYRTTPPVLDSDGSFFLYSKLTVTREEWQQGFVFSCWVMHEALHNHYTQKSLSLSPGK

SEQ ID NO: 2214 - protein, 217 aa, synthetic construct
  REGION 1..217: note = Description of Artificial Sequence: Synthetic polypeptide
  REGION 1..217: note = Synthetic Construct
APELLGGPSVFLFPPKPKDTLMISRTPEVTCVVVDVSHEDPEVKFNWYVDGVEVHNAKTKPREEQYNSTYRVVSVLTVLHQDWLNGKEYKCKVSNKALPAPIEKTISKAKGQPREPQVYTLPPSRDELTKNQVSLTCLVKGFYPSDIAVLWESYGTEWSSYRTTPPVLDSDGSFFLYSKLTVTKEEWQQGFVFSCWVMHEALHNHYTQKSLSLSPGK

SEQ ID NO: 2215 - protein, 217 aa, synthetic construct
  REGION 1..217: note = Description of Artificial Sequence: Synthetic polypeptide
  REGION 1..217: note = Synthetic Construct
APELLGGPSVFLFPPKPKDTLMISRTPEVTCVVVDVSHEDPEVKFNWYVDGVEVHNAKTKPREEQYNSTYRVVSVLTVLHQDWLNGKEYKCKVSNKALPAPIEKTISKAKGQPREPQVYTLPPSRDELTKNQVSLTCLVKGFYPSDIAVLWESYGTEWSSYRTTPPVLDSDGSFFLYSKLTVTREEWQQGFVFTCWVMHEALHNHYTQKSLSLSPGK

SEQ ID NO: 2216 - protein, 217 aa, synthetic construct
  REGION 1..217: note = Description of Artificial Sequence: Synthetic polypeptide
  REGION 1..217: note = Synthetic Construct
APELLGGPSVFLFPPKPKDTLMISRTPEVTCVVVDVSHEDPEVKFNWYVDGVEVHNAKTKPREEQYNSTYRVVSVLTVLHQDWLNGKEYKCKVSNKALPAPIEKTISKAKGQPREPQVYTLPPSRDELTKNQVSLTCLVKGFYPSDIAVLWESYGTEWSSYRTTPPVLDSDGSFFLYSKLTVTREEWQQGFVFTCGVMHEALHNHYTQKSLSLSPGK

SEQ ID NO: 2217 - protein, 217 aa, synthetic construct
  REGION 1..217: note = Description of Artificial Sequence: Synthetic polypeptide
  REGION 1..217: note = Synthetic Construct
APELLGGPSVFLFPPKPKDTLMISRTPEVTCVVVDVSHEDPEVKFNWYVDGVEVHNAKTKPREEQYNSTYRVVSVLTVLHQDWLNGKEYKCKVSNKALPAPIEKTISKAKGQPREPQVYTLPPSRDELTKNQVSLTCLVKGFYPSDIAVLWESYGTEWSSYRTTPPVLDSDGSFFLYSKLTVTREEWQQGFVFECWVMHEALHNHYTQKSLSLSPGK

SEQ ID NO: 2218 - protein, 217 aa, synthetic construct
  REGION 1..217: note = Description of Artificial Sequence: Synthetic polypeptide
  REGION 1..217: note = Synthetic Construct
APELLGGPSVFLFPPKPKDTLMISRTPEVTCVVVDVSHEDPEVKFNWYVDGVEVHNAKTKPREEQYNSTYRVVSVLTVLHQDWLNGKEYKCKVSNKALPAPIEKTISKAKGQPREPQVYTLPPSRDELTKNQVSLTCLVKGFYPSDIAVLWESYGTEWSSYRTTPPVLDSDGSFFLYSKLTVTREEWQQGFVFKCWVMHEALHNHYTQKSLSLSPGK

SEQ ID NO: 2219 - protein, 217 aa, synthetic construct
  REGION 1..217: note = Description of Artificial Sequence: Synthetic polypeptide
  REGION 1..217: note = Synthetic Construct
APELLGGPSVFLFPPKPKDTLMISRTPEVTCVVVDVSHEDPEVKFNWYVDGVEVHNAKTKPREEQYNSTYRVVSVLTVLHQDWLNGKEYKCKVSNKALPAPIEKTISKAKGQPREPQVYTLPPSRDELTKNQVSLTCLVKGFYPSDIAVLWESYGTEWSSYRTTPPVLDSDGSFFLYSKLTVTPEEWQQGFVFKCWVMHEALHNHYTQKSLSLSPGK

SEQ ID NO: 2220 - protein, 217 aa, synthetic construct
  REGION 1..217: note = Description of Artificial Sequence: Synthetic polypeptide
  REGION 1..217: note = Synthetic Construct
APELLGGPSVFLFPPKPKDTLMISRTPEVTCVVVDVSHEDPEVKFNWYVDGVEVHNAKTKPREEQYNSTYRVVSVLTVLHQDWLNGKEYKCKVSNKALPAPIEKTISKAKGQPREPQVYTLPPSRDELTKNQVSLTCLVKGFYPSDIAVWWESYGTEWSSYRTTPPVLDSDGSFFLYSKLTVTREEWQQGFVFSCSVMHEALHNHYTQKSLSLSPGK

SEQ ID NO: 2221 - protein, 217 aa, synthetic construct
  REGION 1..217: note = Description of Artificial Sequence: Synthetic polypeptide
  REGION 1..217: note = Synthetic Construct
APELLGGPSVFLFPPKPKDTLMISRTPEVTCVVVDVSHEDPEVKFNWYVDGVEVHNAKTKPREEQYNSTYRVVSVLTVLHQDWLNGKEYKCKVSNKALPAPIEKTISKAKGQPREPQVYTLPPSRDELTKNQVSLTCLVKGFYPSDIAVWWESYGTEWSSYRTTPPVLDSDGSFFLYSKLTVTGEEWQQGFVFSCSVMHEALHNHYTQKSLSLSPGK

SEQ ID NO: 2222 - protein, 217 aa, synthetic construct
  REGION 1..217: note = Description of Artificial Sequence: Synthetic polypeptide
  REGION 1..217: note = Synthetic Construct
APELLGGPSVFLFPPKPKDTLMISRTPEVTCVVVDVSHEDPEVKFNWYVDGVEVHNAKTKPREEQYNSTYRVVSVLTVLHQDWLNGKEYKCKVSNKALPAPIEKTISKAKGQPREPQVYTLPPSRDELTKNQVSLTCLVKGFYPSDIAVWWESYGTEWSSYRTTPPVLDSDGSFFLYSKLTVTREEWQQGFVFTCWVMHEALHNHYTQKSLSLSPGK

SEQ ID NO: 2223 - protein, 217 aa, synthetic construct
  REGION 1..217: note = Description of Artificial Sequence: Synthetic polypeptide
  REGION 1..217: note = Synthetic Construct
APELLGGPSVFLFPPKPKDTLMISRTPEVTCVVVDVSHEDPEVKFNWYVDGVEVHNAKTKPREEQYNSTYRVVSVLTVLHQDWLNGKEYKCKVSNKALPAPIEKTISKAKGQPREPQVYTLPPSRDELTKNQVSLTCLVKGFYPSDIAVWWESYGTEWSSYRTTPPVLDSDGSFFLYSKLTVTGEEWQQGFVFTCWVMHEALHNHYTQKSLSLSPGK

SEQ ID NO: 2224 - protein, 217 aa, synthetic construct
  REGION 1..217: note = Description of Artificial Sequence: Synthetic polypeptide
  REGION 1..217: note = Synthetic Construct
APELLGGPSVFLFPPKPKDTLMISRTPEVTCVVVDVSHEDPEVKFNWYVDGVEVHNAKTKPREEQYNSTYRVVSVLTVLHQDWLNGKEYKCKVSNKALPAPIEKTISKAKGQPREPQVYTLPPSRDELTKNQVSLTCLVKGFYPSDIAVWWESYGTEWSSYRTTPPVLDSDGSFFLYSKLTVTREEWQQGFVFTCGVMHEALHNHYTQKSLSLSPGK

SEQ ID NO: 2225 - protein, 217 aa, synthetic construct
  REGION 1..217: note = Description of Artificial Sequence: Synthetic polypeptide
  REGION 1..217: note = Synthetic Construct
APELLGGPSVFLFPPKPKDTLMISRTPEVTCVVVDVSHEDPEVKFNWYVDGVEVHNAKTKPREEQYNSTYRVVSVLTVLHQDWLNGKEYKCKVSNKALPAPIEKTISKAKGQPREPQVYTLPPSRDELTKNQVSLTCLVKGFYPSDIAVLWESYGTEWSSYRTTPPVLDSDGSFFLYSKLTVTKEEWQQGFVFSCSVMHEALHNHYTQKSLSLSPGK

SEQ ID NO: 2226 - protein, 217 aa, synthetic construct
  REGION 1..217: note = Description of Artificial Sequence: Synthetic polypeptide
  REGION 1..217: note = Synthetic Construct
APELLGGPSVFLFPPKPKDTLMISRTPEVTCVVVDVSHEDPEVKFNWYVDGVEVHNAKTKPREEQYNSTYRVVSVLTVLHQDWLNGKEYKCKVSNKALPAPIEKTISKAKGQPRFDYVTTLPPSRDELTKNQVSLTCLVKGFYPSDIAVEWESNGQPENNYKTTPPVLDSDGSFFLYSKLTVDKSRWQQGNVFSCSVMHEALHNHYGFHDLSLSPGK

SEQ ID NO: 2227 - protein, 217 aa, synthetic construct
  REGION 1..217: note = Description of Artificial Sequence: Synthetic polypeptide
  REGION 1..217: note = Synthetic Construct
APELLGGPSVFLFPPKPKDTLMISRTPEVTCVVVDVSHEDPEVKFNWYVDGVEVHNAKTKPREEQYNSTYRVVSVLTVLHQDWLNGKEYKCKVSNKALPAPIEKTISKAKGQPRFDMVTTLPPSRDELTKNQVSLTCLVKGFYPSDIAVEWESNGQPENNYKTTPPVLDSDGSFFLYSKLTVDKSRWQQGNVFSCSVMHEALHNHYGFHDLSLSPGK

SEQ ID NO: 2228 - protein, 217 aa, synthetic construct
  REGION 1..217: note = Description of Artificial Sequence: Synthetic polypeptide
  REGION 1..217: note = Synthetic Construct
APELLGGPSVFLFPPKPKDTLMISRTPEVTCVVVDVSHEDPEVKFNWYVDGVEVHNAKTKPREEQYNSTYRVVSVLTVLHQDWLNGKEYKCKVSNKALPAPIEKTISKAKGQPRFEYVTTLPPSRDELTKNQVSLTCLVKGFYPSDIAVEWESNGQPENNYKTTPPVLDSDGSFFLYSKLTVDKSRWQQGNVFSCSVMHEALHNHYGFHDLSLSPGK

SEQ ID NO: 2229 - protein, 217 aa, synthetic construct
  REGION 1..217: note = Description of Artificial Sequence: Synthetic polypeptide
  REGION 1..217: note = Synthetic Construct
APELLGGPSVFLFPPKPKDTLMISRTPEVTCVVVDVSHEDPEVKFNWYVDGVEVHNAKTKPREEQYNSTYRVVSVLTVLHQDWLNGKEYKCKVSNKALPAPIEKTISKAKGQPRFEMVTTLPPSRDELTKNQVSLTCLVKGFYPSDIAVEWESNGQPENNYKTTPPVLDSDGSFFLYSKLTVDKSRWQQGNVFSCSVMHEALHNHYGFHDLSLSPGK

SEQ ID NO: 2230 - protein, 217 aa, synthetic construct
  REGION 1..217: note = Description of Artificial Sequence: Synthetic polypeptide
  REGION 1..217: note = Synthetic Construct
APELLGGPSVFLFPPKPKDTLMISRTPEVTCVVVDVSHEDPEVKFNWYVDGVEVHNAKTKPREEQYNSTYRVVSVLTVLHQDWLNGKEYKCKVSNKALPAPIEKTISKAKGQPRFELVTTLPPSRDELTKNQVSLTCLVKGFYPSDIAVEWESNGQPENNYKTTPPVLDSDGSFFLYSKLTVDKSRWQQGNVFSCSVMHEALHNHYGFHDLSLSPGK

SEQ ID NO: 2231 - protein, 217 aa, synthetic construct
  REGION 1..217: note = Description of Artificial Sequence: Synthetic polypeptide
  REGION 1..217: note = Synthetic Construct
APELLGGPSVFLFPPKPKDTLMISRTPEVTCVVVDVSHEDPEVEFIWYVDGVDVRYEWQLPREEQYNSTYRVVSVLTVLHQDWLNGKEYKCKVSNKALPAPIEKTISKAKGQPREPQVYTLPPSRDELTKNQVSLTCLVKGFYPSDIAVEWESNGQPENNYKTTPPVLDSDGSFFLYSKLTVDKSRWQQGNVFSCSVMHEALHNHYTQKSLSLSPGK

SEQ ID NO: 2232 - protein, 217 aa, synthetic construct
  REGION 1..217: note = Description of Artificial Sequence: Synthetic polypeptide
  REGION 1..217: note = Synthetic Construct
APELLGGPSVFLFPPKPKDTLMISRTPEVTCVVVDVSHEDPEVGFVWYVDGVPVSWEWYWPREEQYNSTYRVVSVLTVLHQDWLNGKEYKCKVSNKALPAPIEKTISKAKGQPREPQVYTLPPSRDELTKNQVSLTCLVKGFYPSDIAVEWESNGQPENNYKTTPPVLDSDGSFFLYSKLTVDKSRWQQGNVFSCSVMHEALHNHYTQKSLSLSPGK

SEQ ID NO: 2233 - protein, 217 aa, synthetic construct
  REGION 1..217: note = Description of Artificial Sequence: Synthetic polypeptide
  REGION 1..217: note = Synthetic Construct
APELLGGPSVFLFPPKPKDTLMISRTPEVTCVVVDVSHEDPEVQFDWYVDGVMVRREWHRPREEQYNSTYRVVSVLTVLHQDWLNGKEYKCKVSNKALPAPIEKTISKAKGQPREPQVYTLPPSRDELTKNQVSLTCLVKGFYPSDIAVEWESNGQPENNYKTTPPVLDSDGSFFLYSKLTVDKSRWQQGNVFSCSVMHEALHNHYTQKSLSLSPGK

SEQ ID NO: 2234 - protein, 217 aa, synthetic construct
  REGION 1..217: note = Description of Artificial Sequence: Synthetic polypeptide
  REGION 1..217: note = Synthetic Construct
APELLGGPSVFLFPPKPKDTLMISRTPEVTCVVVDVSHEDPEVSFEWYVDGVPVRWEWQWPREEQYNSTYRVVSVLTVLHQDWLNGKEYKCKVSNKALPAPIEKTISKAKGQPREPQVYTLPPSRDELTKNQVSLTCLVKGFYPSDIAVEWESNGQPENNYKTTPPVLDSDGSFFLYSKLTVDKSRWQQGNVFSCSVMHEALHNHYTQKSLSLSPGK

SEQ ID NO: 2235 - protein, 217 aa, synthetic construct
  REGION 1..217: note = Description of Artificial Sequence: Synthetic polypeptide
  REGION 1..217: note = Synthetic Construct
APELLGGPSVFLFPPKPKDTLMISRTPEVTCVVVDVSHEDPEVAFTWYVDGVPVRWEWQNPREEQYNSTYRVVSVLTVLHQDWLNGKEYKCKVSNKALPAPIEKTISKAKGQPREPQVYTLPPSRDELTKNQVSLTCLVKGFYPSDIAVEWESNGQPENNYKTTPPVLDSDGSFFLYSKLTVDKSRWQQGNVFSCSVMHEALHNHYTQKSLSLSPGK

SEQ ID NO: 2236 - protein, 217 aa, synthetic construct
  REGION 1..217: note = Description of Artificial Sequence: Synthetic polypeptide
  REGION 1..217: note = Synthetic Construct
APELLGGPSVFLFPPKPKDTLMISRTPEVTCVVVDPQTPPWEVKFNWYVDGVEVHNAKTKPREEEYYTYYRVVSVLTVLHQDWLNGKEYKCKVSNKALPAPIEKTISKAKGQPREPQVYTLPPSRDELTKNQVSLTCLVKGFYPSDIAVEWESNGQPENNYKTTPPVLDSDGSFFLYSKLTVDKSRWQQGNVFSCSVMHEALHNHYTQKSLSLSPGK

SEQ ID NO: 2237 - protein, 217 aa, synthetic construct
  REGION 1..217: note = Description of Artificial Sequence: Synthetic polypeptide
  REGION 1..217: note = Synthetic Construct
APELLGGPSVFLFPPKPKDTLMISRTPEVTCVVVDPPSPPWEVKFNWYVDGVEVHNAKTKPREEEYYSNYRVVSVLTVLHQDWLNGKEYKCKVSNKALPAPIEKTISKAKGQPREPQVYTLPPSRDELTKNQVSLTCLVKGFYPSDIAVEWESNGQPENNYKTTPPVLDSDGSFFLYSKLTVDKSRWQQGNVFSCSVMHEALHNHYTQKSLSLSPGK

SEQ ID NO: 2238 - protein, 217 aa, synthetic construct
  REGION 1..217: note = Description of Artificial Sequence: Synthetic polypeptide
  REGION 1..217: note = Synthetic Construct
APELLGGPSVFLFPPKPKDTLMISRTPEVTCVVVDPQTPPWEVKFNWYVDGVEVHNAKTKPREEEYYSNYRVVSVLTVLHQDWLNGKEYKCKVSNKALPAPIEKTISKAKGQPREPQVYTLPPSRDELTKNQVSLTCLVKGFYPSDIAVEWESNGQPENNYKTTPPVLDSDGSFFLYSKLTVDKSRWQQGNVFSCSVMHEALHNHYTQKSLSLSPGK

SEQ ID NO: 2239 - protein, 217 aa, synthetic construct
  REGION 1..217: note = Description of Artificial Sequence: Synthetic polypeptide
  REGION 1..217: note = Synthetic Construct
APELLGGPSVFLFPPKPKDTLMISRTPEVTCVVVDFRGPPWEVKFNWYVDGVEVHNAKTKPREEEYYHDYRVVSVLTVLHQDWLNGKEYKCKVSNKALPAPIEKTISKAKGQPREPQVYTLPPSRDELTKNQVSLTCLVKGFYPSDIAVEWESNGQPENNYKTTPPVLDSDGSFFLYSKLTVDKSRWQQGNVFSCSVMHEALHNHYTQKSLSLSPGK

SEQ ID NO: 2240 - protein, 217 aa, synthetic construct
  REGION 1..217: note = Description of Artificial Sequence: Synthetic polypeptide
  REGION 1..217: note = Synthetic Construct
APELLGGPSVFLFPPKPKDTLMISRTPEVTCVVVDPQTVPWEVKFNWYVDGVEVHNAKTKPREEEYYSNYRVVSVLTVLHQDWLNGKEYKCKVSNKALPAPIEKTISKAKGQPREPQVYTLPPSRDELTKNQVSLTCLVKGFYPSDIAVEWESNGQPENNYKTTPPVLDSDGSFFLYSKLTVDKSRWQQGNVFSCSVMHEALHNHYTQKSLSLSPGK

SEQ ID NO: 2241 - protein, 217 aa, synthetic construct
  REGION 1..217: note = Description of Artificial Sequence: Synthetic polypeptide
  REGION 1..217: note = Synthetic Construct
APELLGGPSVFLFPPKPKDTLMISRTPEVTCVVVDVSVPPRMVKFNWYVDGVEVHNAKTKSLTSQHNSTVRVVSVLTVLHQDWLNGKEYKCKVSNKALPAPIEKTISKAKGQPREPQVYTLPPSRDELTKNQVSLTCLVKGFYPSDIAVEWESNGQPENNYKTTPPVLDSDGSFFLYSKLTVDKSRWQQGNVFSCSVMHEALHNHYTQKSLSLSPGK

SEQ ID NO: 2242 - protein, 217 aa, synthetic construct
  REGION 1..217: note = Description of Artificial Sequence: Synthetic polypeptide
  REGION 1..217: note = Synthetic Construct
APELLGGPSVFLFPPKPKDTLMISRTPEVTCVVVDVSVPPWMVKFNWYVDGVEVHNAKTKSLTSQHNSTVRVVSVLTVLHQDWLNGKEYKCKVSNKALPAPIEKTISKAKGQPREPQVYTLPPSRDELTKNQVSLTCLVKGFYPSDIAVEWESNGQPENNYKTTPPVLDSDGSFFLYSKLTVDKSRWQQGNVFSCSVMHEALHNHYTQKSLSLSPGK

SEQ ID NO: 2243 - protein, 217 aa, synthetic construct
  REGION 1..217: note = Description of Artificial Sequence: Synthetic polypeptide
  REGION 1..217: note = Synthetic Construct
APELLGGPSVFLFPPKPKDTLMISRTPEVTCVVVDVSDMWEYVKFNWYVDGVEVHNAKTKPWVKQLNSTWRVVSVLTVLHQDWLNGKEYKCKVSNKALPAPIEKTISKAKGQPREPQVYTLPPSRDELTKNQVSLTCLVKGFYPSDIAVEWESNGQPENNYKTTPPVLDSDGSFFLYSKLTVDKSRWQQGNVFSCSVMHEALHNHYTQKSLSLSPGK

SEQ ID NO: 2244 - protein, 217 aa, synthetic construct
  REGION 1..217: note = Description of Artificial Sequence: Synthetic polypeptide
  REGION 1..217: note = Synthetic Construct
APELLGGPSVFLFPPKPKDTLMISRTPEVTCVVVDVSDDWTWVKFNWYVDGVEVHNAKTKPWIAQPNSTWRVVSVLTVLHQDWLNGKEYKCKVSNKALPAPIEKTISKAKGQPREPQVYTLPPSRDELTKNQVSLTCLVKGFYPSDIAVEWESNGQPENNYKTTPPVLDSDGSFFLYSKLTVDKSRWQQGNVFSCSVMHEALHNHYTQKSLSLSPGK

SEQ ID NO: 2245 - protein, 217 aa, synthetic construct
  REGION 1..217: note = Description of Artificial Sequence: Synthetic polypeptide
  REGION 1..217: note = Synthetic Construct
APELLGGPSVFLFPPKPKDTLMISRTPEVTCVVVDVSDDWEWVKFNWYVDGVEVHNAKTKPWKLQLNSTWRVVSVLTVLHQDWLNGKEYKCKVSNKALPAPIEKTISKAKGQPREPQVYTLPPSRDELTKNQVSLTCLVKGFYPSDIAVEWESNGQPENNYKTTPPVLDSDGSFFLYSKLTVDKSRWQQGNVFSCSVMHEALHNHYTQKSLSLSPGK

SEQ ID NO: 2246 - protein, 217 aa, synthetic construct
  REGION 1..217: note = Description of Artificial Sequence: Synthetic polypeptide
  REGION 1..217: note = Synthetic Construct
APELLGGPSVFLFPPKPKDTLMISRTPEVTCVVVDVSHEDPWVWFYWYVDGVEVHNAKTKPREEQYNSTYRVVSVLTVLHQDWLNGKEYKCSVVNIALWWSIEKTISKAKGQPREPQVYTLPPSRDELTKNQVSLTCLVKGFYPSDIAVEWESNGQPENNYKTTPPVLDSDGSFFLYSKLTVDKSRWQQGNVFSCSVMHEALHNHYTQKSLSLSPGK

SEQ ID NO: 2247 - protein, 217 aa, synthetic construct
  REGION 1..217: note = Description of Artificial Sequence: Synthetic polypeptide
  REGION 1..217: note = Synthetic Construct
APELLGGPSVFLFPPKPKDTLMISRTPEVTCVVVDVSHEDPVVGFRWYVDGVEVHNAKTKPREEQYNSTYRVVSVLTVLHQDWLNGKEYKCRVSNSALTWKIEKTISKAKGQPREPQVYTLPPSRDELTKNQVSLTCLVKGFYPSDIAVEWESNGQPENNYKTTPPVLDSDGSFFLYSKLTVDKSRWQQGNVFSCSVMHEALHNHYTQKSLSLSPGK

SEQ ID NO: 2248 - protein, 217 aa, synthetic construct
  REGION 1..217: note = Description of Artificial Sequence: Synthetic polypeptide
  REGION 1..217: note = Synthetic Construct
APELLGGPSVFLFPPKPKDTLMISRTPEVTCVVVDVSHEDPVVGFRWYVDGVEVHNAKTKPREEQYNSTYRVVSVLTVLHQDWLNGKEYKCRVSNSALSWRIEKTISKAKGQPREPQVYTLPPSRDELTKNQVSLTCLVKGFYPSDIAVEWESNGQPENNYKTTPPVLDSDGSFFLYSKLTVDKSRWQQGNVFSCSVMHEALHNHYTQKSLSLSPGK

SEQ ID NO: 2249 - protein, 217 aa, synthetic construct
  REGION 1..217: note = Description of Artificial Sequence: Synthetic polypeptide
  REGION 1..217: note = Synthetic Construct
APELLGGPSVFLFPPKPKDTLMISRTPEVTCVVVDVSHEDPIVGFRWYVDGVEVHNAKTKPREEQYNSTYRVVSVLTVLHQDWLNGKEYKCRVSNSALRWRIEKTISKAKGQPREPQVYTLPPSRDELTKNQVSLTCLVKGFYPSDIAVEWESNGQPENNYKTTPPVLDSDGSFFLYSKLTVDKSRWQQGNVFSCSVMHEALHNHYTQKSLSLSPGK

SEQ ID NO: 2250 - protein, 217 aa, synthetic construct
  REGION 1..217: note = Description of Artificial Sequence: Synthetic polypeptide
  REGION 1..217: note = Synthetic Construct
APELLGGPSVFLFPPKPKDTLMISRTPEVTCVVVDVSHEDPAVGFEWYVDGVEVHNAKTKPREEQYNSTYRVVSVLTVLHQDWLNGKEYKCQVFNWALDWVIEKTISKAKGQPREPQVYTLPPSRDELTKNQVSLTCLVKGFYPSDIAVEWESNGQPENNYKTTPPVLDSDGSFFLYSKLTVDKSRWQQGNVFSCSVMHEALHNHYTQKSLSLSPGK

SEQ ID NO: 2251 - protein, 217 aa, synthetic construct
  REGION 1..217: note = Description of Artificial Sequence: Synthetic polypeptide
  REGION 1..217: note = Synthetic Construct
APELLGGPSVFLFPPKPKDTLMISRTPEVTCVVVDVSHEDPEVKFNWYVDGVEVHNAKTKPREEQYNSTYRVVSVLTVLHQDWLNGKEYKCKVSNKALPAPIEKTISKAKGQPREPQVYTLPPSRDELTKNQVSLSCAVKGFYPSDIAVEWESNGQPENNYKTTPPVLDSDGSFFLVSKLTVDKSRWQQGNVFSCSVMHEALHNHYTQKSLSLSPGK

SEQ ID NO: 2252 - protein, 217 aa, synthetic construct
  REGION 1..217: note = Description of Artificial Sequence: Synthetic polypeptide
  REGION 1..217: note = Synthetic Construct
APEAAGGPSVFLFPPKPKDTLMISRTPEVTCVVVDVSHEDPEVKFNWYVDGVEVHNAKTKPREEQYNSTYRVVSVLTVLHQDWLNGKEYKCKVSNKALPAPIEKTISKAKGQPREPQVYTLPPSRDELTKNQVSLSCAVKGFYPSDIAVEWESNGQPENNYKTTPPVLDSDGSFFLVSKLTVDKSRWQQGNVFSCSVMHEALHNHYTQKSLSLSPGK

SEQ ID NO: 2253 - protein, 217 aa, synthetic construct
  REGION 1..217: note = Description of Artificial Sequence: Synthetic polypeptide
  REGION 1..217: note = Synthetic Construct
APELLGGPSVFLFPPKPKDTLYITREPEVTCVVVDVSHEDPEVKFNWYVDGVEVHNAKTKPREEQYNSTYRVVSVLTVLHQDWLNGKEYKCKVSNKALPAPIEKTISKAKGQPREPQVYTLPPSRDELTKNQVSLSCAVKGFYPSDIAVEWESNGQPENNYKTTPPVLDSDGSFFLVSKLTVDKSRWQQGNVFSCSVMHEALHNHYTQKSLSLSPGK

SEQ ID NO: 2254 - protein, 217 aa, synthetic construct
  REGION 1..217: note = Description of Artificial Sequence: Synthetic polypeptide
  REGION 1..217: note = Synthetic Construct
APEAAGGPSVFLFPPKPKDTLYITREPEVTCVVVDVSHEDPEVKFNWYVDGVEVHNAKTKPREEQYNSTYRVVSVLTVLHQDWLNGKEYKCKVSNKALPAPIEKTISKAKGQPREPQVYTLPPSRDELTKNQVSLSCAVKGFYPSDIAVEWESNGQPENNYKTTPPVLDSDGSFFLVSKLTVDKSRWQQGNVFSCSVMHEALHNHYTQKSLSLSPGK

SEQ ID NO: 2255 - protein, 217 aa, synthetic construct
  REGION 1..217: note = Description of Artificial Sequence: Synthetic polypeptide
  REGION 1..217: note = Synthetic Construct
APELLGGPSVFLFPPKPKDTLMISRTPEVTCVVVDVSHEDPEVKFNWYVDGVEVHNAKTKPREEQYNSTYRVVSVLTVLHQDWLNGKEYKCKVSNKALPAPIEKTISKAKGQPREPQVYTLPPSRDELTKNQVSLWCLVKGFYPSDIAVEWESNGQPENNYKTTPPVLDSDGSFFLYSKLTVDKSRWQQGNVFSCSVMHEALHNHYTQKSLSLSPGK

SEQ ID NO: 2256 - protein, 217 aa, synthetic construct
  REGION 1..217: note = Description of Artificial Sequence: Synthetic polypeptide
  REGION 1..217: note = Synthetic Construct
APEAAGGPSVFLFPPKPKDTLMISRTPEVTCVVVDVSHEDPEVKFNWYVDGVEVHNAKTKPREEQYNSTYRVVSVLTVLHQDWLNGKEYKCKVSNKALPAPIEKTISKAKGQPREPQVYTLPPSRDELTKNQVSLWCLVKGFYPSDIAVEWESNGQPENNYKTTPPVLDSDGSFFLYSKLTVDKSRWQQGNVFSCSVMHEALHNHYTQKSLSLSPGK

SEQ ID NO: 2257 - protein, 217 aa, synthetic construct
  REGION 1..217: note = Description of Artificial Sequence: Synthetic polypeptide
  REGION 1..217: note = Synthetic Construct
APELLGGPSVFLFPPKPKDTLYITREPEVTCVVVDVSHEDPEVKFNWYVDGVEVHNAKTKPREEQYNSTYRVVSVLTVLHQDWLNGKEYKCKVSNKALPAPIEKTISKAKGQPREPQVYTLPPSRDELTKNQVSLWCLVKGFYPSDIAVEWESNGQPENNYKTTPPVLDSDGSFFLYSKLTVDKSRWQQGNVFSCSVMHEALHNHYTQKSLSLSPGK

SEQ ID NO: 2258 - protein, 217 aa, synthetic construct
  REGION 1..217: note = Description of Artificial Sequence: Synthetic polypeptide
  REGION 1..217: note = Synthetic Construct
APEAAGGPSVFLFPPKPKDTLYITREPEVTCVVVDVSHEDPEVKFNWYVDGVEVHNAKTKPREEQYNSTYRVVSVLTVLHQDWLNGKEYKCKVSNKALPAPIEKTISKAKGQPREPQVYTLPPSRDELTKNQVSLWCLVKGFYPSDIAVEWESNGQPENNYKTTPPVLDSDGSFFLYSKLTVDKSRWQQGNVFSCSVMHEALHNHYTQKSLSLSPGK

SEQ ID NO: 2259 - protein, 217 aa, synthetic construct
  REGION 1..217: note = Description of Artificial Sequence: Synthetic polypeptide
  REGION 1..217: note = Synthetic Construct
APELLGGPSVFLFPPKPKDTLMISRTPEVTCVVVDVSHEDPEVKFNWYVDGVEVHNAKTKPREEQYNSTYRVVSVLTVLHQDWLNGKEYKCKVSNKALPAPIEKTISKAKGQPREPQVYTLPPSRDELTKNQVSLWCLVKGFYPSDIAVWWESYGTEWSSYKTTPPVLDSDGSFFLYSKLTVTKEEWQQGFVFSCSVMHEALHNHYTQKSLSLSPGK

SEQ ID NO: 2260 - protein, 217 aa, synthetic construct
  REGION 1..217: note = Description of Artificial Sequence: Synthetic polypeptide
  REGION 1..217: note = Synthetic Construct
APEAAGGPSVFLFPPKPKDTLMISRTPEVTCVVVDVSHEDPEVKFNWYVDGVEVHNAKTKPREEQYNSTYRVVSVLTVLHQDWLNGKEYKCKVSNKALPAPIEKTISKAKGQPREPQVYTLPPSRDELTKNQVSLWCLVKGFYPSDIAVWWESYGTEWSSYKTTPPVLDSDGSFFLYSKLTVTKEEWQQGFVFSCSVMHEALHNHYTQKSLSLSPGK

SEQ ID NO: 2261 - protein, 217 aa, synthetic construct
  REGION 1..217: note = Description of Artificial Sequence: Synthetic polypeptide
  REGION 1..217: note = Synthetic Construct
APELLGGPSVFLFPPKPKDTLYITREPEVTCVVVDVSHEDPEVKFNWYVDGVEVHNAKTKPREEQYNSTYRVVSVLTVLHQDWLNGKEYKCKVSNKALPAPIEKTISKAKGQPREPQVYTLPPSRDELTKNQVSLWCLVKGFYPSDIAVWWESYGTEWSSYKTTPPVLDSDGSFFLYSKLTVTKEEWQQGFVFSCSVMHEALHNHYTQKSLSLSPGK

SEQ ID NO: 2262 - protein, 217 aa, synthetic construct
  REGION 1..217: note = Description of Artificial Sequence: Synthetic polypeptide
  REGION 1..217: note = Synthetic Construct
APEAAGGPSVFLFPPKPKDTLYITREPEVTCVVVDVSHEDPEVKFNWYVDGVEVHNAKTKPREEQYNSTYRVVSVLTVLHQDWLNGKEYKCKVSNKALPAPIEKTISKAKGQPREPQVYTLPPSRDELTKNQVSLWCLVKGFYPSDIAVWWESYGTEWSSYKTTPPVLDSDGSFFLYSKLTVTKEEWQQGFVFSCSVMHEALHNHYTQKSLSLSPGK

SEQ ID NO: 2263 - protein, 217 aa, synthetic construct
  REGION 1..217: note = Description of Artificial Sequence: Synthetic polypeptide
  REGION 1..217: note = Synthetic Construct
APELLGGPSVFLFPPKPKDTLMISRTPEVTCVVVDVSHEDPEVKFNWYVDGVEVHNAKTKPREEQYNSTYRVVSVLTVLHQDWLNGKEYKCKVSNKALPAPIEKTISKAKGQPREPQVYTLPPSRDELTKNQVSLSCAVKGFYPSDIAVWWESYGTEWSSYKTTPPVLDSDGSFFLVSKLTVTKEEWQQGFVFSCSVMHEALHNHYTQKSLSLSPGK

SEQ ID NO: 2264 - protein, 217 aa, synthetic construct
  REGION 1..217: note = Description of Artificial Sequence: Synthetic polypeptide
  REGION 1..217: note = Synthetic Construct
APEAAGGPSVFLFPPKPKDTLMISRTPEVTCVVVDVSHEDPEVKFNWYVDGVEVHNAKTKPREEQYNSTYRVVSVLTVLHQDWLNGKEYKCKVSNKALPAPIEKTISKAKGQPREPQVYTLPPSRDELTKNQVSLSCAVKGFYPSDIAVWWESYGTEWSSYKTTPPVLDSDGSFFLVSKLTVTKEEWQQGFVFSCSVMHEALHNHYTQKSLSLSPGK

SEQ ID NO: 2265 - protein, 217 aa, synthetic construct
  REGION 1..217: note = Description of Artificial Sequence: Synthetic polypeptide
  REGION 1..217: note = Synthetic Construct
APELLGGPSVFLFPPKPKDTLYITREPEVTCVVVDVSHEDPEVKFNWYVDGVEVHNAKTKPREEQYNSTYRVVSVLTVLHQDWLNGKEYKCKVSNKALPAPIEKTISKAKGQPREPQVYTLPPSRDELTKNQVSLSCAVKGFYPSDIAVWWESYGTEWSSYKTTPPVLDSDGSFFLVSKLTVTKEEWQQGFVFSCSVMHEALHNHYTQKSLSLSPGK

SEQ ID NO: 2266 - protein, 217 aa, synthetic construct
  REGION 1..217: note = Description of Artificial Sequence: Synthetic polypeptide
  REGION 1..217: note = Synthetic Construct
APEAAGGPSVFLFPPKPKDTLYITREPEVTCVVVDVSHEDPEVKFNWYVDGVEVHNAKTKPREEQYNSTYRVVSVLTVLHQDWLNGKEYKCKVSNKALPAPIEKTISKAKGQPREPQVYTLPPSRDELTKNQVSLSCAVKGFYPSDIAVWWESYGTEWSSYKTTPPVLDSDGSFFLVSKLTVTKEEWQQGFVFSCSVMHEALHNHYTQKSLSLSPGK

SEQ ID NO: 2267 - protein, 217 aa, synthetic construct
  REGION 1..217: note = Description of Artificial Sequence: Synthetic polypeptide
  REGION 1..217: note = Synthetic Construct
APELLGGPSVFLFPPKPKDTLMISRTPEVTCVVVDVSHEDPEVKFNWYVDGVEVHNAKTKPREEQYNSTYRVVSVLTVLHQDWLNGKEYKCKVSNKALPAPIEKTISKAKGQPREPQVYTLPPSRDELTKNQVSLWCLVKGFYPSDIAVEWESFGTEWSSYKTTPPVLDSDGSFFLYSKLTVTKEEWQQGFVFSCSVMHEALHNHYTQKSLSLSPGK

SEQ ID NO: 2268 - protein, 217 aa, synthetic construct
  REGION 1..217: note = Description of Artificial Sequence: Synthetic polypeptide
  REGION 1..217: note = Synthetic Construct
APEAAGGPSVFLFPPKPKDTLMISRTPEVTCVVVDVSHEDPEVKFNWYVDGVEVHNAKTKPREEQYNSTYRVVSVLTVLHQDWLNGKEYKCKVSNKALPAPIEKTISKAKGQPREPQVYTLPPSRDELTKNQVSLWCLVKGFYPSDIAVEWESFGTEWSSYKTTPPVLDSDGSFFLYSKLTVTKEEWQQGFVFSCSVMHEALHNHYTQKSLSLSPGK

SEQ ID NO: 2269 - protein, 217 aa, synthetic construct
  REGION 1..217: note = Description of Artificial Sequence: Synthetic polypeptide
  REGION 1..217: note = Synthetic Construct
APEAAGGPSVFLFPPKPKDTLMISRTPEVTCVVVDVSHEDPEVKFNWYVDGVEVHNAKTKPREEQYNSTYRVVSVLTVLHQDWLNGKEYKCKVSNKALGAPIEKTISKAKGQPREPQVYTLPPSRDELTKNQVSLWCLVKGFYPSDIAVEWESFGTEWSSYKTTPPVLDSDGSFFLYSKLTVTKEEWQQGFVFSCSVMHEALHNHYTQKSLSLSPGK

SEQ ID NO: 2270 - protein, 217 aa, synthetic construct
  REGION 1..217: note = Description of Artificial Sequence: Synthetic polypeptide
  REGION 1..217: note = Synthetic Construct
APELLGGPSVFLFPPKPKDTLYITREPEVTCVVVDVSHEDPEVKFNWYVDGVEVHNAKTKPREEQYNSTYRVVSVLTVLHQDWLNGKEYKCKVSNKALPAPIEKTISKAKGQPREPQVYTLPPSRDELTKNQVSLWCLVKGFYPSDIAVEWESFGTEWSSYKTTPPVLDSDGSFFLYSKLTVTKEEWQQGFVFSCSVMHEALHNHYTQKSLSLSPGK

SEQ ID NO: 2271 - protein, 217 aa, synthetic construct
  REGION 1..217: note = Description of Artificial Sequence: Synthetic polypeptide
  REGION 1..217: note = Synthetic Construct
APEAAGGPSVFLFPPKPKDTLYITREPEVTCVVVDVSHEDPEVKFNWYVDGVEVHNAKTKPREEQYNSTYRVVSVLTVLHQDWLNGKEYKCKVSNKALPAPIEKTISKAKGQPREPQVYTLPPSRDELTKNQVSLWCLVKGFYPSDIAVEWESFGTEWSSYKTTPPVLDSDGSFFLYSKLTVTKEEWQQGFVFSCSVMHEALHNHYTQKSLSLSPGK

SEQ ID NO: 2272 - protein, 217 aa, synthetic construct
  REGION 1..217: note = Description of Artificial Sequence: Synthetic polypeptide
  REGION 1..217: note = Synthetic Construct
APEAAGGPSVFLFPPKPKDTLYITREPEVTCVVVDVSHEDPEVKFNWYVDGVEVHNAKTKPREEQYNSTYRVVSVLTVLHQDWLNGKEYKCKVSNKALGAPIEKTISKAKGQPREPQVYTLPPSRDELTKNQVSLWCLVKGFYPSDIAVEWESFGTEWSSYKTTPPVLDSDGSFFLYSKLTVTKEEWQQGFVFSCSVMHEALHNHYTQKSLSLSPGK

SEQ ID NO: 2273 - protein, 217 aa, synthetic construct
  REGION 1..217: note = Description of Artificial Sequence: Synthetic polypeptide
  REGION 1..217: note = Synthetic Construct
APELLGGPSVFLFPPKPKDTLMISRTPEVTCVVVDVSHEDPEVKFNWYVDGVEVHNAKTKPREEQYNSTYRVVSVLTVLHQDWLNGKEYKCKVSNKALPAPIEKTISKAKGQPREPQVYTLPPSRDELTKNQVSLSCAVKGFYPSDIAVEWESFGTEWSSYKTTPPVLDSDGSFFLVSKLTVTKEEWQQGFVFSCSVMHEALHNHYTQKSLSLSPGK

SEQ ID NO: 2274 - protein, 217 aa, synthetic construct
  REGION 1..217: note = Description of Artificial Sequence: Synthetic polypeptide
  REGION 1..217: note = Synthetic Construct
APEAAGGPSVFLFPPKPKDTLMISRTPEVTCVVVDVSHEDPEVKFNWYVDGVEVHNAKTKPREEQYNSTYRVVSVLTVLHQDWLNGKEYKCKVSNKALPAPIEKTISKAKGQPREPQVYTLPPSRDELTKNQVSLSCAVKGFYPSDIAVEWESFGTEWSSYKTTPPVLDSDGSFFLVSKLTVTKEEWQQGFVFSCSVMHEALHNHYTQKSLSLSPGK

SEQ ID NO: 2275 - protein, 217 aa, synthetic construct
  REGION 1..217: note = Description of Artificial Sequence: Synthetic polypeptide
  REGION 1..217: note = Synthetic Construct
APEAAGGPSVFLFPPKPKDTLMISRTPEVTCVVVDVSHEDPEVKFNWYVDGVEVHNAKTKPREEQYNSTYRVVSVLTVLHQDWLNGKEYKCKVSNKALGAPIEKTISKAKGQPREPQVYTLPPSRDELTKNQVSLSCAVKGFYPSDIAVEWESFGTEWSSYKTTPPVLDSDGSFFLVSKLTVTKEEWQQGFVFSCSVMHEALHNHYTQKSLSLSPGK

SEQ ID NO: 2276 - protein, 217 aa, synthetic construct
  REGION 1..217: note = Description of Artificial Sequence: Synthetic polypeptide
  REGION 1..217: note = Synthetic Construct
APELLGGPSVFLFPPKPKDTLYITREPEVTCVVVDVSHEDPEVKFNWYVDGVEVHNAKTKPREEQYNSTYRVVSVLTVLHQDWLNGKEYKCKVSNKALPAPIEKTISKAKGQPREPQVYTLPPSRDELTKNQVSLSCAVKGFYPSDIAVEWESFGTEWSSYKTTPPVLDSDGSFFLVSKLTVTKEEWQQGFVFSCSVMHEALHNHYTQKSLSLSPGK

SEQ ID NO: 2277 - protein, 217 aa, synthetic construct
  REGION 1..217: note = Description of Artificial Sequence: Synthetic polypeptide
  REGION 1..217: note = Synthetic Construct
APEAAGGPSVFLFPPKPKDTLYITREPEVTCVVVDVSHEDPEVKFNWYVDGVEVHNAKTKPREEQYNSTYRVVSVLTVLHQDWLNGKEYKCKVSNKALPAPIEKTISKAKGQPREPQVYTLPPSRDELTKNQVSLSCAVKGFYPSDIAVEWESFGTEWSSYKTTPPVLDSDGSFFLVSKLTVTKEEWQQGFVFSCSVMHEALHNHYTQKSLSLSPGK

SEQ ID NO: 2278 - protein, 217 aa, synthetic construct
  REGION 1..217: note = Description of Artificial Sequence: Synthetic polypeptide
  REGION 1..217: note = Synthetic Construct
APEAAGGPSVFLFPPKPKDTLYITREPEVTCVVVDVSHEDPEVKFNWYVDGVEVHNAKTKPREEQYNSTYRVVSVLTVLHQDWLNGKEYKCKVSNKALGAPIEKTISKAKGQPREPQVYTLPPSRDELTKNQVSLSCAVKGFYPSDIAVEWESFGTEWSSYKTTPPVLDSDGSFFLVSKLTVTKEEWQQGFVFSCSVMHEALHNHYTQKSLSLSPGK

SEQ ID NO: 2279 - protein, 217 aa, synthetic construct
  REGION 1..217: note = Description of Artificial Sequence: Synthetic polypeptide
  REGION 1..217: note = Synthetic Construct
APELLGGPSVFLFPPKPKDTLMISRTPEVTCVVVDVSHEDPEVKFNWYVDGVEVHNAKTKPREEQYNSTYRVVSVLTVLHQDWLNGKEYKCKVSNKALPAPIEKTISKAKGQPREPQVYTLPPSRDELTKNQVSLWCLVKGFYPSDIAVEWESYGTEWANYKTTPPVLDSDGSFFLYSKLTVTKEEWQQGFVFSCSVMHEALHNHYTQKSLSLSPGK

SEQ ID NO: 2280 - protein, 217 aa, synthetic construct
  REGION 1..217: note = Description of Artificial Sequence: Synthetic polypeptide
  REGION 1..217: note = Synthetic Construct
APEAAGGPSVFLFPPKPKDTLMISRTPEVTCVVVDVSHEDPEVKFNWYVDGVEVHNAKTKPREEQYNSTYRVVSVLTVLHQDWLNGKEYKCKVSNKALPAPIEKTISKAKGQPREPQVYTLPPSRDELTKNQVSLWCLVKGFYPSDIAVEWESYGTEWANYKTTPPVLDSDGSFFLYSKLTVTKEEWQQGFVFSCSVMHEALHNHYTQKSLSLSPGK

SEQ ID NO: 2281 - protein, 217 aa, synthetic construct
  REGION 1..217: note = Description of Artificial Sequence: Synthetic polypeptide
  REGION 1..217: note = Synthetic Construct
APEAAGGPSVFLFPPKPKDTLMISRTPEVTCVVVDVSHEDPEVKFNWYVDGVEVHNAKTKPREEQYNSTYRVVSVLTVLHQDWLNGKEYKCKVSNKALGAPIEKTISKAKGQPREPQVYTLPPSRDELTKNQVSLWCLVKGFYPSDIAVEWESYGTEWANYKTTPPVLDSDGSFFLYSKLTVTKEEWQQGFVFSCSVMHEALHNHYTQKSLSLSPGK

SEQ ID NO: 2282 - protein, 217 aa, synthetic construct
  REGION 1..217: note = Description of Artificial Sequence: Synthetic polypeptide
  REGION 1..217: note = Synthetic Construct
APELLGGPSVFLFPPKPKDTLYITREPEVTCVVVDVSHEDPEVKFNWYVDGVEVHNAKTKPREEQYNSTYRVVSVLTVLHQDWLNGKEYKCKVSNKALPAPIEKTISKAKGQPREPQVYTLPPSRDELTKNQVSLWCLVKGFYPSDIAVEWESYGTEWANYKTTPPVLDSDGSFFLYSKLTVTKEEWQQGFVFSCSVMHEALHNHYTQKSLSLSPGK

SEQ ID NO: 2283 - protein, 217 aa, synthetic construct
  REGION 1..217: note = Description of Artificial Sequence: Synthetic polypeptide
  REGION 1..217: note = Synthetic Construct
APEAAGGPSVFLFPPKPKDTLYITREPEVTCVVVDVSHEDPEVKFNWYVDGVEVHNAKTKPREEQYNSTYRVVSVLTVLHQDWLNGKEYKCKVSNKALPAPIEKTISKAKGQPREPQVYTLPPSRDELTKNQVSLWCLVKGFYPSDIAVEWESYGTEWANYKTTPPVLDSDGSFFLYSKLTVTKEEWQQGFVFSCSVMHEALHNHYTQKSLSLSPGK

SEQ ID NO: 2284 - protein, 217 aa, synthetic construct
  REGION 1..217: note = Description of Artificial Sequence: Synthetic polypeptide
  REGION 1..217: note = Synthetic Construct
APEAAGGPSVFLFPPKPKDTLYITREPEVTCVVVDVSHEDPEVKFNWYVDGVEVHNAKTKPREEQYNSTYRVVSVLTVLHQDWLNGKEYKCKVSNKALGAPIEKTISKAKGQPREPQVYTLPPSRDELTKNQVSLWCLVKGFYPSDIAVEWESYGTEWANYKTTPPVLDSDGSFFLYSKLTVTKEEWQQGFVFSCSVMHEALHNHYTQKSLSLSPGK

SEQ ID NO: 2285 - protein, 217 aa, synthetic construct
  REGION 1..217: note = Description of Artificial Sequence: Synthetic polypeptide
  REGION 1..217: note = Synthetic Construct
APELLGGPSVFLFPPKPKDTLMISRTPEVTCVVVDVSHEDPEVKFNWYVDGVEVHNAKTKPREEQYNSTYRVVSVLTVLHQDWLNGKEYKCKVSNKALPAPIEKTISKAKGQPREPQVYTLPPSRDELTKNQVSLSCAVKGFYPSDIAVEWESYGTEWANYKTTPPVLDSDGSFFLVSKLTVTKEEWQQGFVFSCSVMHEALHNHYTQKSLSLSPGK

SEQ ID NO: 2286 - protein, 217 aa, synthetic construct
  REGION 1..217: note = Description of Artificial Sequence: Synthetic polypeptide
  REGION 1..217: note = Synthetic Construct
APEAAGGPSVFLFPPKPKDTLMISRTPEVTCVVVDVSHEDPEVKFNWYVDGVEVHNAKTKPREEQYNSTYRVVSVLTVLHQDWLNGKEYKCKVSNKALPAPIEKTISKAKGQPREPQVYTLPPSRDELTKNQVSLSCAVKGFYPSDIAVEWESYGTEWANYKTTPPVLDSDGSFFLVSKLTVTKEEWQQGFVFSCSVMHEALHNHYTQKSLSLSPGK

SEQ ID NO: 2287 - protein, 217 aa, synthetic construct
  REGION 1..217: note = Description of Artificial Sequence: Synthetic polypeptide
  REGION 1..217: note = Synthetic Construct
APEAAGGPSVFLFPPKPKDTLMISRTPEVTCVVVDVSHEDPEVKFNWYVDGVEVHNAKTKPREEQYNSTYRVVSVLTVLHQDWLNGKEYKCKVSNKALGAPIEKTISKAKGQPREPQVYTLPPSRDELTKNQVSLSCAVKGFYPSDIAVEWESYGTEWANYKTTPPVLDSDGSFFLVSKLTVTKEEWQQGFVFSCSVMHEALHNHYTQKSLSLSPGK

SEQ ID NO: 2288 - protein, 217 aa, synthetic construct
  REGION 1..217: note = Description of Artificial Sequence: Synthetic polypeptide
  REGION 1..217: note = Synthetic Construct
APELLGGPSVFLFPPKPKDTLYITREPEVTCVVVDVSHEDPEVKFNWYVDGVEVHNAKTKPREEQYNSTYRVVSVLTVLHQDWLNGKEYKCKVSNKALPAPIEKTISKAKGQPREPQVYTLPPSRDELTKNQVSLSCAVKGFYPSDIAVEWESYGTEWANYKTTPPVLDSDGSFFLVSKLTVTKEEWQQGFVFSCSVMHEALHNHYTQKSLSLSPGK

SEQ ID NO: 2289 - protein, 217 aa, synthetic construct
  REGION 1..217: note = Description of Artificial Sequence: Synthetic polypeptide
  REGION 1..217: note = Synthetic Construct
APEAAGGPSVFLFPPKPKDTLYITREPEVTCVVVDVSHEDPEVKFNWYVDGVEVHNAKTKPREEQYNSTYRVVSVLTVLHQDWLNGKEYKCKVSNKALPAPIEKTISKAKGQPREPQVYTLPPSRDELTKNQVSLSCAVKGFYPSDIAVEWESYGTEWANYKTTPPVLDSDGSFFLVSKLTVTKEEWQQGFVFSCSVMHEALHNHYTQKSLSLSPGK

SEQ ID NO: 2290 - protein, 217 aa, synthetic construct
  REGION 1..217: note = Description of Artificial Sequence: Synthetic polypeptide
  REGION 1..217: note = Synthetic Construct
APEAAGGPSVFLFPPKPKDTLYITREPEVTCVVVDVSHEDPEVKFNWYVDGVEVHNAKTKPREEQYNSTYRVVSVLTVLHQDWLNGKEYKCKVSNKALGAPIEKTISKAKGQPREPQVYTLPPSRDELTKNQVSLSCAVKGFYPSDIAVEWESYGTEWANYKTTPPVLDSDGSFFLVSKLTVTKEEWQQGFVFSCSVMHEALHNHYTQKSLSLSPGK

SEQ ID NO: 2291 - protein, 217 aa, synthetic construct
  REGION 1..217: note = Description of Artificial Sequence: Synthetic polypeptide
  REGION 1..217: note = Synthetic Construct
APELLGGPSVFLFPPKPKDTLMISRTPEVTCVVVDVSHEDPEVKFNWYVDGVEVHNAKTKPREEQYNSTYRVVSVLTVLHQDWLNGKEYKCKVSNKALPAPIEKTISKAKGQPREPQVYTLPPSRDELTKNQVSLWCLVKGFYPSDIAVEWESYGTEWVNYKTTPPVLDSDGSFFLYSKLTVTKEEWQQGFVFSCSVMHEALHNHYTQKSLSLSPGK

SEQ ID NO: 2292 - protein, 217 aa, synthetic construct
  REGION 1..217: note = Description of Artificial Sequence: Synthetic polypeptide
  REGION 1..217: note = Synthetic Construct
APEAAGGPSVFLFPPKPKDTLMISRTPEVTCVVVDVSHEDPEVKFNWYVDGVEVHNAKTKPREEQYNSTYRVVSVLTVLHQDWLNGKEYKCKVSNKALPAPIEKTISKAKGQPREPQVYTLPPSRDELTKNQVSLWCLVKGFYPSDIAVEWESYGTEWVNYKTTPPVLDSDGSFFLYSKLTVTKEEWQQGFVFSCSVMHEALHNHYTQKSLSLSPGK

SEQ ID NO: 2293 - protein, 217 aa, synthetic construct
  REGION 1..217: note = Description of Artificial Sequence: Synthetic polypeptide
  REGION 1..217: note = Synthetic Construct
APEAAGGPSVFLFPPKPKDTLMISRTPEVTCVVVDVSHEDPEVKFNWYVDGVEVHNAKTKPREEQYNSTYRVVSVLTVLHQDWLNGKEYKCKVSNKALGAPIEKTISKAKGQPREPQVYTLPPSRDELTKNQVSLWCLVKGFYPSDIAVEWESYGTEWVNYKTTPPVLDSDGSFFLYSKLTVTKEEWQQGFVFSCSVMHEALHNHYTQKSLSLSPGK

SEQ ID NO: 2294 - protein, 217 aa, synthetic construct
  REGION 1..217: note = Description of Artificial Sequence: Synthetic polypeptide
  REGION 1..217: note = Synthetic Construct
APELLGGPSVFLFPPKPKDTLYITREPEVTCVVVDVSHEDPEVKFNWYVDGVEVHNAKTKPREEQYNSTYRVVSVLTVLHQDWLNGKEYKCKVSNKALPAPIEKTISKAKGQPREPQVYTLPPSRDELTKNQVSLWCLVKGFYPSDIAVEWESYGTEWVNYKTTPPVLDSDGSFFLYSKLTVTKEEWQQGFVFSCSVMHEALHNHYTQKSLSLSPGK

SEQ ID NO: 2295 - protein, 217 aa, synthetic construct
  REGION 1..217: note = Description of Artificial Sequence: Synthetic polypeptide
  REGION 1..217: note = Synthetic Construct
APEAAGGPSVFLFPPKPKDTLYITREPEVTCVVVDVSHEDPEVKFNWYVDGVEVHNAKTKPREEQYNSTYRVVSVLTVLHQDWLNGKEYKCKVSNKALPAPIEKTISKAKGQPREPQVYTLPPSRDELTKNQVSLWCLVKGFYPSDIAVEWESYGTEWVNYKTTPPVLDSDGSFFLYSKLTVTKEEWQQGFVFSCSVMHEALHNHYTQKSLSLSPGK

SEQ ID NO: 2296 - protein, 217 aa, synthetic construct
  REGION 1..217: note = Description of Artificial Sequence: Synthetic polypeptide
  REGION 1..217: note = Synthetic Construct
APEAAGGPSVFLFPPKPKDTLYITREPEVTCVVVDVSHEDPEVKFNWYVDGVEVHNAKTKPREEQYNSTYRVVSVLTVLHQDWLNGKEYKCKVSNKALGAPIEKTISKAKGQPREPQVYTLPPSRDELTKNQVSLWCLVKGFYPSDIAVEWESYGTEWVNYKTTPPVLDSDGSFFLYSKLTVTKEEWQQGFVFSCSVMHEALHNHYTQKSLSLSPGK

SEQ ID NO: 2297 - protein, 217 aa, synthetic construct
  REGION 1..217: note = Description of Artificial Sequence: Synthetic polypeptide
  REGION 1..217: note = Synthetic Construct
APELLGGPSVFLFPPKPKDTLMISRTPEVTCVVVDVSHEDPEVKFNWYVDGVEVHNAKTKPREEQYNSTYRVVSVLTVLHQDWLNGKEYKCKVSNKALPAPIEKTISKAKGQPREPQVYTLPPSRDELTKNQVSLSCAVKGFYPSDIAVEWESYGTEWVNYKTTPPVLDSDGSFFLVSKLTVTKEEWQQGFVFSCSVMHEALHNHYTQKSLSLSPGK

SEQ ID NO: 2298 - protein, 217 aa, synthetic construct
  REGION 1..217: note = Description of Artificial Sequence: Synthetic polypeptide
  REGION 1..217: note = Synthetic Construct
APEAAGGPSVFLFPPKPKDTLMISRTPEVTCVVVDVSHEDPEVKFNWYVDGVEVHNAKTKPREEQYNSTYRVVSVLTVLHQDWLNGKEYKCKVSNKALPAPIEKTISKAKGQPREPQVYTLPPSRDELTKNQVSLSCAVKGFYPSDIAVEWESYGTEWVNYKTTPPVLDSDGSFFLVSKLTVTKEEWQQGFVFSCSVMHEALHNHYTQKSLSLSPGK

SEQ ID NO: 2299 - protein, 217 aa, synthetic construct
  REGION 1..217: note = Description of Artificial Sequence: Synthetic polypeptide
  REGION 1..217: note = Synthetic Construct
APEAAGGPSVFLFPPKPKDTLMISRTPEVTCVVVDVSHEDPEVKFNWYVDGVEVHNAKTKPREEQYNSTYRVVSVLTVLHQDWLNGKEYKCKVSNKALGAPIEKTISKAKGQPREPQVYTLPPSRDELTKNQVSLSCAVKGFYPSDIAVEWESYGTEWVNYKTTPPVLDSDGSFFLVSKLTVTKEEWQQGFVFSCSVMHEALHNHYTQKSLSLSPGK

SEQ ID NO: 2300 - protein, 217 aa, synthetic construct
  REGION 1..217: note = Description of Artificial Sequence: Synthetic polypeptide
  REGION 1..217: note = Synthetic Construct
APELLGGPSVFLFPPKPKDTLYITREPEVTCVVVDVSHEDPEVKFNWYVDGVEVHNAKTKPREEQYNSTYRVVSVLTVLHQDWLNGKEYKCKVSNKALPAPIEKTISKAKGQPREPQVYTLPPSRDELTKNQVSLSCAVKGFYPSDIAVEWESYGTEWVNYKTTPPVLDSDGSFFLVSKLTVTKEEWQQGFVFSCSVMHEALHNHYTQKSLSLSPGK

SEQ ID NO: 2301 - protein, 217 aa, synthetic construct
  REGION 1..217: note = Description of Artificial Sequence: Synthetic polypeptide
  REGION 1..217: note = Synthetic Construct
APEAAGGPSVFLFPPKPKDTLYITREPEVTCVVVDVSHEDPEVKFNWYVDGVEVHNAKTKPREEQYNSTYRVVSVLTVLHQDWLNGKEYKCKVSNKALPAPIEKTISKAKGQPREPQVYTLPPSRDELTKNQVSLSCAVKGFYPSDIAVEWESYGTEWVNYKTTPPVLDSDGSFFLVSKLTVTKEEWQQGFVFSCSVMHEALHNHYTQKSLSLSPGK

SEQ ID NO: 2302 - protein, 217 aa, synthetic construct
  REGION 1..217: note = Description of Artificial Sequence: Synthetic polypeptide
  REGION 1..217: note = Synthetic Construct
APEAAGGPSVFLFPPKPKDTLYITREPEVTCVVVDVSHEDPEVKFNWYVDGVEVHNAKTKPREEQYNSTYRVVSVLTVLHQDWLNGKEYKCKVSNKALGAPIEKTISKAKGQPREPQVYTLPPSRDELTKNQVSLSCAVKGFYPSDIAVEWESYGTEWVNYKTTPPVLDSDGSFFLVSKLTVTKEEWQQGFVFSCSVMHEALHNHYTQKSLSLSPGK

SEQ ID NO: 2303 - protein, 217 aa, synthetic construct
  REGION 1..217: note = Description of Artificial Sequence: Synthetic polypeptide
  REGION 1..217: note = Synthetic Construct
APELLGGPSVFLFPPKPKDTLMISRTPEVTCVVVDVSHEDPEVKFNWYVDGVEVHNAKTKPREEQYNSTYRVVSVLTVLHQDWLNGKEYKCKVSNKALPAPIEKTISKAKGQPREPQVYTLPPSRDELTKNQVSLWCLVKGFYPSDIAVEWESYGTEWSNYKTTPPVLDSDGSFFLYSKLTVSKEEWQQGFVFSCSVMHEALHNHYTQKSLSLSPGK

SEQ ID NO: 2304 - protein, 217 aa, synthetic construct
  REGION 1..217: note = Description of Artificial Sequence: Synthetic polypeptide
  REGION 1..217: note = Synthetic Construct
APEAAGGPSVFLFPPKPKDTLMISRTPEVTCVVVDVSHEDPEVKFNWYVDGVEVHNAKTKPREEQYNSTYRVVSVLTVLHQDWLNGKEYKCKVSNKALPAPIEKTISKAKGQPREPQVYTLPPSRDELTKNQVSLWCLVKGFYPSDIAVEWESYGTEWSNYKTTPPVLDSDGSFFLYSKLTVSKEEWQQGFVFSCSVMHEALHNHYTQKSLSLSPGK

SEQ ID NO: 2305 - protein, 217 aa, synthetic construct
  REGION 1..217: note = Description of Artificial Sequence: Synthetic polypeptide
  REGION 1..217: note = Synthetic Construct
APEAAGGPSVFLFPPKPKDTLMISRTPEVTCVVVDVSHEDPEVKFNWYVDGVEVHNAKTKPREEQYNSTYRVVSVLTVLHQDWLNGKEYKCKVSNKALGAPIEKTISKAKGQPREPQVYTLPPSRDELTKNQVSLWCLVKGFYPSDIAVEWESYGTEWSNYKTTPPVLDSDGSFFLYSKLTVSKEEWQQGFVFSCSVMHEALHNHYTQKSLSLSPGK

SEQ ID NO: 2306 - protein, 217 aa, synthetic construct
  REGION 1..217: note = Description of Artificial Sequence: Synthetic polypeptide
  REGION 1..217: note = Synthetic Construct
APELLGGPSVFLFPPKPKDTLYITREPEVTCVVVDVSHEDPEVKFNWYVDGVEVHNAKTKPREEQYNSTYRVVSVLTVLHQDWLNGKEYKCKVSNKALPAPIEKTISKAKGQPREPQVYTLPPSRDELTKNQVSLWCLVKGFYPSDIAVEWESYGTEWSNYKTTPPVLDSDGSFFLYSKLTVSKEEWQQGFVFSCSVMHEALHNHYTQKSLSLSPGK

SEQ ID NO: 2307 - protein, 217 aa, synthetic construct
  REGION 1..217: note = Description of Artificial Sequence: Synthetic polypeptide
  REGION 1..217: note = Synthetic Construct
APEAAGGPSVFLFPPKPKDTLYITREPEVTCVVVDVSHEDPEVKFNWYVDGVEVHNAKTKPREEQYNSTYRVVSVLTVLHQDWLNGKEYKCKVSNKALPAPIEKTISKAKGQPREPQVYTLPPSRDELTKNQVSLWCLVKGFYPSDIAVEWESYGTEWSNYKTTPPVLDSDGSFFLYSKLTVSKEEWQQGFVFSCSVMHEALHNHYTQKSLSLSPGK

SEQ ID NO: 2308 - protein, 217 aa, synthetic construct
  REGION 1..217: note = Description of Artificial Sequence: Synthetic polypeptide
  REGION 1..217: note = Synthetic Construct
APEAAGGPSVFLFPPKPKDTLYITREPEVTCVVVDVSHEDPEVKFNWYVDGVEVHNAKTKPREEQYNSTYRVVSVLTVLHQDWLNGKEYKCKVSNKALGAPIEKTISKAKGQPREPQVYTLPPSRDELTKNQVSLWCLVKGFYPSDIAVEWESYGTEWSNYKTTPPVLDSDGSFFLYSKLTVSKEEWQQGFVFSCSVMHEALHNHYTQKSLSLSPGK

SEQ ID NO: 2309 - protein, 217 aa, synthetic construct
  REGION 1..217: note = Description of Artificial Sequence: Synthetic polypeptide
  REGION 1..217: note = Synthetic Construct
APELLGGPSVFLFPPKPKDTLMISRTPEVTCVVVDVSHEDPEVKFNWYVDGVEVHNAKTKPREEQYNSTYRVVSVLTVLHQDWLNGKEYKCKVSNKALPAPIEKTISKAKGQPREPQVYTLPPSRDELTKNQVSLSCAVKGFYPSDIAVEWESYGTEWSNYKTTPPVLDSDGSFFLVSKLTVSKEEWQQGFVFSCSVMHEALHNHYTQKSLSLSPGK

SEQ ID NO: 2310 - protein, 217 aa, synthetic construct
  REGION 1..217: note = Description of Artificial Sequence: Synthetic polypeptide
  REGION 1..217: note = Synthetic Construct
APEAAGGPSVFLFPPKPKDTLMISRTPEVTCVVVDVSHEDPEVKFNWYVDGVEVHNAKTKPREEQYNSTYRVVSVLTVLHQDWLNGKEYKCKVSNKALPAPIEKTISKAKGQPREPQVYTLPPSRDELTKNQVSLSCAVKGFYPSDIAVEWESYGTEWSNYKTTPPVLDSDGSFFLVSKLTVSKEEWQQGFVFSCSVMHEALHNHYTQKSLSLSPGK

SEQ ID NO: 2311 - protein, 217 aa, synthetic construct
  REGION 1..217: note = Description of Artificial Sequence: Synthetic polypeptide
  REGION 1..217: note = Synthetic Construct
APEAAGGPSVFLFPPKPKDTLMISRTPEVTCVVVDVSHEDPEVKFNWYVDGVEVHNAKTKPREEQYNSTYRVVSVLTVLHQDWLNGKEYKCKVSNKALGAPIEKTISKAKGQPREPQVYTLPPSRDELTKNQVSLSCAVKGFYPSDIAVEWESYGTEWSNYKTTPPVLDSDGSFFLVSKLTVSKEEWQQGFVFSCSVMHEALHNHYTQKSLSLSPGK

SEQ ID NO: 2312 - protein, 217 aa, synthetic construct
  REGION 1..217: note = Description of Artificial Sequence: Synthetic polypeptide
  REGION 1..217: note = Synthetic Construct
APELLGGPSVFLFPPKPKDTLYITREPEVTCVVVDVSHEDPEVKFNWYVDGVEVHNAKTKPREEQYNSTYRVVSVLTVLHQDWLNGKEYKCKVSNKALPAPIEKTISKAKGQPREPQVYTLPPSRDELTKNQVSLSCAVKGFYPSDIAVEWESYGTEWSNYKTTPPVLDSDGSFFLVSKLTVSKEEWQQGFVFSCSVMHEALHNHYTQKSLSLSPGK

SEQ ID NO: 2313 - protein, 217 aa, synthetic construct
  REGION 1..217: note = Description of Artificial Sequence: Synthetic polypeptide
  REGION 1..217: note = Synthetic Construct
APEAAGGPSVFLFPPKPKDTLYITREPEVTCVVVDVSHEDPEVKFNWYVDGVEVHNAKTKPREEQYNSTYRVVSVLTVLHQDWLNGKEYKCKVSNKALPAPIEKTISKAKGQPREPQVYTLPPSRDELTKNQVSLSCAVKGFYPSDIAVEWESYGTEWSNYKTTPPVLDSDGSFFLVSKLTVSKEEWQQGFVFSCSVMHEALHNHYTQKSLSLSPGK

SEQ ID NO: 2314 - protein, 217 aa, synthetic construct
  REGION 1..217: note = Description of Artificial Sequence: Synthetic polypeptide
  REGION 1..217: note = Synthetic Construct
APEAAGGPSVFLFPPKPKDTLYITREPEVTCVVVDVSHEDPEVKFNWYVDGVEVHNAKTKPREEQYNSTYRVVSVLTVLHQDWLNGKEYKCKVSNKALGAPIEKTISKAKGQPREPQVYTLPPSRDELTKNQVSLSCAVKGFYPSDIAVEWESYGTEWSNYKTTPPVLDSDGSFFLVSKLTVSKEEWQQGFVFSCSVMHEALHNHYTQKSLSLSPGK

SEQ ID NO: 2315 - protein, 217 aa, synthetic construct
  REGION 1..217: note = Description of Artificial Sequence: Synthetic polypeptide
  REGION 1..217: note = Synthetic Construct
APELLGGPSVFLFPPKPKDTLMISRTPEVTCVVVDVSHEDPEVKFNWYVDGVEVHNAKTKPREEQYNSTYRVVSVLTVLHQDWLNGKEYKCKVSNKALPAPIEKTISKAKGQPREPQVYTLPPSRDELTKNQVSLWCLVKGFYPSDIAVLWESYGTEWASYKTTPPVLDSDGSFFLYSKLTVTKEEWQQGFVFSCSVMHEALHNHYTQKSLSLSPGK

SEQ ID NO: 2316 - protein, 217 aa, synthetic construct
  REGION 1..217: note = Description of Artificial Sequence: Synthetic polypeptide
  REGION 1..217: note = Synthetic Construct
APEAAGGPSVFLFPPKPKDTLMISRTPEVTCVVVDVSHEDPEVKFNWYVDGVEVHNAKTKPREEQYNSTYRVVSVLTVLHQDWLNGKEYKCKVSNKALPAPIEKTISKAKGQPREPQVYTLPPSRDELTKNQVSLWCLVKGFYPSDIAVLWESYGTEWASYKTTPPVLDSDGSFFLYSKLTVTKEEWQQGFVFSCSVMHEALHNHYTQKSLSLSPGK

SEQ ID NO: 2317 - protein, 217 aa, synthetic construct
  REGION 1..217: note = Description of Artificial Sequence: Synthetic polypeptide
  REGION 1..217: note = Synthetic Construct
APEAAGGPSVFLFPPKPKDTLMISRTPEVTCVVVDVSHEDPEVKFNWYVDGVEVHNAKTKPREEQYNSTYRVVSVLTVLHQDWLNGKEYKCKVSNKALGAPIEKTISKAKGQPREPQVYTLPPSRDELTKNQVSLWCLVKGFYPSDIAVLWESYGTEWASYKTTPPVLDSDGSFFLYSKLTVTKEEWQQGFVFSCSVMHEALHNHYTQKSLSLSPGK

SEQ ID NO: 2318 - protein, 217 aa, synthetic construct
  REGION 1..217: note = Description of Artificial Sequence: Synthetic polypeptide
  REGION 1..217: note = Synthetic Construct
APELLGGPSVFLFPPKPKDTLYITREPEVTCVVVDVSHEDPEVKFNWYVDGVEVHNAKTKPREEQYNSTYRVVSVLTVLHQDWLNGKEYKCKVSNKALPAPIEKTISKAKGQPREPQVYTLPPSRDELTKNQVSLWCLVKGFYPSDIAVLWESYGTEWASYKTTPPVLDSDGSFFLYSKLTVTKEEWQQGFVFSCSVMHEALHNHYTQKSLSLSPGK

SEQ ID NO: 2319 - protein, 217 aa, synthetic construct
  REGION 1..217: note = Description of Artificial Sequence: Synthetic polypeptide
  REGION 1..217: note = Synthetic Construct
APEAAGGPSVFLFPPKPKDTLYITREPEVTCVVVDVSHEDPEVKFNWYVDGVEVHNAKTKPREEQYNSTYRVVSVLTVLHQDWLNGKEYKCKVSNKALPAPIEKTISKAKGQPREPQVYTLPPSRDELTKNQVSLWCLVKGFYPSDIAVLWESYGTEWASYKTTPPVLDSDGSFFLYSKLTVTKEEWQQGFVFSCSVMHEALHNHYTQKSLSLSPGK

SEQ ID NO: 2320 - protein, 217 aa, synthetic construct
  REGION 1..217: note = Description of Artificial Sequence: Synthetic polypeptide
  REGION 1..217: note = Synthetic Construct
APEAAGGPSVFLFPPKPKDTLYITREPEVTCVVVDVSHEDPEVKFNWYVDGVEVHNAKTKPREEQYNSTYRVVSVLTVLHQDWLNGKEYKCKVSNKALGAPIEKTISKAKGQPREPQVYTLPPSRDELTKNQVSLWCLVKGFYPSDIAVLWESYGTEWASYKTTPPVLDSDGSFFLYSKLTVTKEEWQQGFVFSCSVMHEALHNHYTQKSLSLSPGK

SEQ ID NO: 2321 - protein, 217 aa, synthetic construct
  REGION 1..217: note = Description of Artificial Sequence: Synthetic polypeptide
  REGION 1..217: note = Synthetic Construct
APELLGGPSVFLFPPKPKDTLMISRTPEVTCVVVDVSHEDPEVKFNWYVDGVEVHNAKTKPREEQYNSTYRVVSVLTVLHQDWLNGKEYKCKVSNKALPAPIEKTISKAKGQPREPQVYTLPPSRDELTKNQVSLSCAVKGFYPSDIAVLWESYGTEWASYKTTPPVLDSDGSFFLVSKLTVTKEEWQQGFVFSCSVMHEALHNHYTQKSLSLSPGK

SEQ ID NO: 2322 - protein, 217 aa, synthetic construct
  REGION 1..217: note = Description of Artificial Sequence: Synthetic polypeptide
  REGION 1..217: note = Synthetic Construct
APEAAGGPSVFLFPPKPKDTLMISRTPEVTCVVVDVSHEDPEVKFNWYVDGVEVHNAKTKPREEQYNSTYRVVSVLTVLHQDWLNGKEYKCKVSNKALPAPIEKTISKAKGQPREPQVYTLPPSRDELTKNQVSLSCAVKGFYPSDIAVLWESYGTEWASYKTTPPVLDSDGSFFLVSKLTVTKEEWQQGFVFSCSVMHEALHNHYTQKSLSLSPGK

SEQ ID NO: 2323 - protein, 217 aa, synthetic construct
  REGION 1..217: note = Description of Artificial Sequence: Synthetic polypeptide
  REGION 1..217: note = Synthetic Construct
APEAAGGPSVFLFPPKPKDTLMISRTPEVTCVVVDVSHEDPEVKFNWYVDGVEVHNAKTKPREEQYNSTYRVVSVLTVLHQDWLNGKEYKCKVSNKALGAPIEKTISKAKGQPREPQVYTLPPSRDELTKNQVSLSCAVKGFYPSDIAVLWESYGTEWASYKTTPPVLDSDGSFFLVSKLTVTKEEWQQGFVFSCSVMHEALHNHYTQKSLSLSPGK

SEQ ID NO: 2324 - protein, 217 aa, synthetic construct
  REGION 1..217: note = Description of Artificial Sequence: Synthetic polypeptide
  REGION 1..217: note = Synthetic Construct
APELLGGPSVFLFPPKPKDTLYITREPEVTCVVVDVSHEDPEVKFNWYVDGVEVHNAKTKPREEQYNSTYRVVSVLTVLHQDWLNGKEYKCKVSNKALPAPIEKTISKAKGQPREPQVYTLPPSRDELTKNQVSLSCAVKGFYPSDIAVLWESYGTEWASYKTTPPVLDSDGSFFLVSKLTVTKEEWQQGFVFSCSVMHEALHNHYTQKSLSLSPGK

SEQ ID NO: 2325 - protein, 217 aa, synthetic construct
  REGION 1..217: note = Description of Artificial Sequence: Synthetic polypeptide
  REGION 1..217: note = Synthetic Construct
APEAAGGPSVFLFPPKPKDTLYITREPEVTCVVVDVSHEDPEVKFNWYVDGVEVHNAKTKPREEQYNSTYRVVSVLTVLHQDWLNGKEYKCKVSNKALPAPIEKTISKAKGQPREPQVYTLPPSRDELTKNQVSLSCAVKGFYPSDIAVLWESYGTEWASYKTTPPVLDSDGSFFLVSKLTVTKEEWQQGFVFSCSVMHEALHNHYTQKSLSLSPGK

SEQ ID NO: 2326 - protein, 217 aa, synthetic construct
  REGION 1..217: note = Description of Artificial Sequence: Synthetic polypeptide
  REGION 1..217: note = Synthetic Construct
APEAAGGPSVFLFPPKPKDTLYITREPEVTCVVVDVSHEDPEVKFNWYVDGVEVHNAKTKPREEQYNSTYRVVSVLTVLHQDWLNGKEYKCKVSNKALGAPIEKTISKAKGQPREPQVYTLPPSRDELTKNQVSLSCAVKGFYPSDIAVLWESYGTEWASYKTTPPVLDSDGSFFLVSKLTVTKEEWQQGFVFSCSVMHEALHNHYTQKSLSLSPGK

SEQ ID NO: 2327 - protein, 217 aa, synthetic construct
  REGION 1..217: note = Description of Artificial Sequence: Synthetic polypeptide
  REGION 1..217: note = Synthetic Construct
APELLGGPSVFLFPPKPKDTLMISRTPEVTCVVVDVSHEDPEVKFNWYVDGVEVHNAKTKPREEQYNSTYRVVSVLTVLHQDWLNGKEYKCKVSNKALPAPIEKTISKAKGQPREPQVYTLPPSRDELTKNQVSLWCLVKGFYPSDIAVEWESYGTEWSNYKTTPPVLDSDGSFFLYSKLTVTKEEWQQGFVFSCSVMHEALHNHYTQKSLSLSPGK

SEQ ID NO: 2328 - protein, 217 aa, synthetic construct
  REGION 1..217: note = Description of Artificial Sequence: Synthetic polypeptide
  REGION 1..217: note = Synthetic Construct
APEAAGGPSVFLFPPKPKDTLMISRTPEVTCVVVDVSHEDPEVKFNWYVDGVEVHNAKTKPREEQYNSTYRVVSVLTVLHQDWLNGKEYKCKVSNKALPAPIEKTISKAKGQPREPQVYTLPPSRDELTKNQVSLWCLVKGFYPSDIAVEWESYGTEWSNYKTTPPVLDSDGSFFLYSKLTVTKEEWQQGFVFSCSVMHEALHNHYTQKSLSLSPGK

SEQ ID NO: 2329 - protein, 217 aa, synthetic construct
  REGION 1..217: note = Description of Artificial Sequence: Synthetic polypeptide
  REGION 1..217: note = Synthetic Construct
APEAAGGPSVFLFPPKPKDTLMISRTPEVTCVVVDVSHEDPEVKFNWYVDGVEVHNAKTKPREEQYNSTYRVVSVLTVLHQDWLNGKEYKCKVSNKALGAPIEKTISKAKGQPREPQVYTLPPSRDELTKNQVSLWCLVKGFYPSDIAVEWESYGTEWSNYKTTPPVLDSDGSFFLYSKLTVTKEEWQQGFVFSCSVMHEALHNHYTQKSLSLSPGK

SEQ ID NO: 2330 - protein, 217 aa, synthetic construct
  REGION 1..217: note = Description of Artificial Sequence: Synthetic polypeptide
  REGION 1..217: note = Synthetic Construct
APELLGGPSVFLFPPKPKDTLYITREPEVTCVVVDVSHEDPEVKFNWYVDGVEVHNAKTKPREEQYNSTYRVVSVLTVLHQDWLNGKEYKCKVSNKALPAPIEKTISKAKGQPREPQVYTLPPSRDELTKNQVSLWCLVKGFYPSDIAVEWESYGTEWSNYKTTPPVLDSDGSFFLYSKLTVTKEEWQQGFVFSCSVMHEALHNHYTQKSLSLSPGK

SEQ ID NO: 2331 - protein, 217 aa, synthetic construct
  REGION 1..217: note = Description of Artificial Sequence: Synthetic polypeptide
  REGION 1..217: note = Synthetic Construct
APEAAGGPSVFLFPPKPKDTLYITREPEVTCVVVDVSHEDPEVKFNWYVDGVEVHNAKTKPREEQYNSTYRVVSVLTVLHQDWLNGKEYKCKVSNKALPAPIEKTISKAKGQPREPQVYTLPPSRDELTKNQVSLWCLVKGFYPSDIAVEWESYGTEWSNYKTTPPVLDSDGSFFLYSKLTVTKEEWQQGFVFSCSVMHEALHNHYTQKSLSLSPGK

SEQ ID NO: 2332 - protein, 217 aa, synthetic construct
  REGION 1..217: note = Description of Artificial Sequence: Synthetic polypeptide
  REGION 1..217: note = Synthetic Construct
APEAAGGPSVFLFPPKPKDTLYITREPEVTCVVVDVSHEDPEVKFNWYVDGVEVHNAKTKPREEQYNSTYRVVSVLTVLHQDWLNGKEYKCKVSNKALGAPIEKTISKAKGQPREPQVYTLPPSRDELTKNQVSLWCLVKGFYPSDIAVEWESYGTEWSNYKTTPPVLDSDGSFFLYSKLTVTKEEWQQGFVFSCSVMHEALHNHYTQKSLSLSPGK

SEQ ID NO: 2333 - protein, 217 aa, synthetic construct
  REGION 1..217: note = Description of Artificial Sequence: Synthetic polypeptide
  REGION 1..217: note = Synthetic Construct
APELLGGPSVFLFPPKPKDTLMISRTPEVTCVVVDVSHEDPEVKFNWYVDGVEVHNAKTKPREEQYNSTYRVVSVLTVLHQDWLNGKEYKCKVSNKALPAPIEKTISKAKGQPREPQVYTLPPSRDELTKNQVSLSCAVKGFYPSDIAVEWESYGTEWSNYKTTPPVLDSDGSFFLVSKLTVTKEEWQQGFVFSCSVMHEALHNHYTQKSLSLSPGK

SEQ ID NO: 2334 - protein, 217 aa, synthetic construct
  REGION 1..217: note = Description of Artificial Sequence: Synthetic polypeptide
  REGION 1..217: note = Synthetic Construct
APEAAGGPSVFLFPPKPKDTLMISRTPEVTCVVVDVSHEDPEVKFNWYVDGVEVHNAKTKPREEQYNSTYRVVSVLTVLHQDWLNGKEYKCKVSNKALPAPIEKTISKAKGQPREPQVYTLPPSRDELTKNQVSLSCAVKGFYPSDIAVEWESYGTEWSNYKTTPPVLDSDGSFFLVSKLTVTKEEWQQGFVFSCSVMHEALHNHYTQKSLSLSPGK

SEQ ID NO: 2335 - protein, 217 aa, synthetic construct
  REGION 1..217: note = Description of Artificial Sequence: Synthetic polypeptide
  REGION 1..217: note = Synthetic Construct
APEAAGGPSVFLFPPKPKDTLMISRTPEVTCVVVDVSHEDPEVKFNWYVDGVEVHNAKTKPREEQYNSTYRVVSVLTVLHQDWLNGKEYKCKVSNKALGAPIEKTISKAKGQPREPQVYTLPPSRDELTKNQVSLSCAVKGFYPSDIAVEWESYGTEWSNYKTTPPVLDSDGSFFLVSKLTVTKEEWQQGFVFSCSVMHEALHNHYTQKSLSLSPGK

SEQ ID NO: 2336 - protein, 217 aa, synthetic construct
  REGION 1..217: note = Description of Artificial Sequence: Synthetic polypeptide
  REGION 1..217: note = Synthetic Construct
APELLGGPSVFLFPPKPKDTLYITREPEVTCVVVDVSHEDPEVKFNWYVDGVEVHNAKTKPREEQYNSTYRVVSVLTVLHQDWLNGKEYKCKVSNKALPAPIEKTISKAKGQPREPQVYTLPPSRDELTKNQVSLSCAVKGFYPSDIAVEWESYGTEWSNYKTTPPVLDSDGSFFLVSKLTVTKEEWQQGFVFSCSVMHEALHNHYTQKSLSLSPGK

SEQ ID NO: 2337 - protein, 217 aa, synthetic construct
  REGION 1..217: note = Description of Artificial Sequence: Synthetic polypeptide
  REGION 1..217: note = Synthetic Construct
APEAAGGPSVFLFPPKPKDTLYITREPEVTCVVVDVSHEDPEVKFNWYVDGVEVHNAKTKPREEQYNSTYRVVSVLTVLHQDWLNGKEYKCKVSNKALPAPIEKTISKAKGQPREPQVYTLPPSRDELTKNQVSLSCAVKGFYPSDIAVEWESYGTEWSNYKTTPPVLDSDGSFFLVSKLTVTKEEWQQGFVFSCSVMHEALHNHYTQKSLSLSPGK

SEQ ID NO: 2338 - protein, 217 aa, synthetic construct
  REGION 1..217: note = Description of Artificial Sequence: Synthetic polypeptide
  REGION 1..217: note = Synthetic Construct
APEAAGGPSVFLFPPKPKDTLYITREPEVTCVVVDVSHEDPEVKFNWYVDGVEVHNAKTKPREEQYNSTYRVVSVLTVLHQDWLNGKEYKCKVSNKALGAPIEKTISKAKGQPREPQVYTLPPSRDELTKNQVSLSCAVKGFYPSDIAVEWESYGTEWSNYKTTPPVLDSDGSFFLVSKLTVTKEEWQQGFVFSCSVMHEALHNHYTQKSLSLSPGK

SEQ ID NO: 2339 - protein, 7 aa, synthetic construct
  REGION 1..7: note = Description of Artificial Sequence: Synthetic peptide
  REGION 1..7: note = Synthetic Construct
  VARIANT 2: note = any amino acid
YXTEWSS

SEQ ID NO: 2340 - skipped

SEQ ID NO: 2341 - DNA, 20 bp, synthetic construct
  misc_feature 1..20: note = Description of Artificial Sequence: Synthetic oligonucleotide
  misc_feature 1..20: note = Synthetic Construct
  source 1..20: mol_type = other DNA
ggacagggatccagagttcc

SEQ ID NO: 2342 - DNA, 20 bp, synthetic construct
  misc_feature 1..20: note = Description of Artificial Sequence: Synthetic oligonucleotide
  misc_feature 1..20: note = Synthetic Construct
  source 1..20: mol_type = other DNA
agctgggaaggtgtgcacac

SEQ ID NO: 2343 - DNA, 19 bp, synthetic construct
  misc_feature 1..19: note = Description of Artificial Sequence: Synthetic oligonucleotide
  misc_feature 1..19: note = Synthetic Construct
  source 1..19: mol_type = other DNA
caggggccagtggatagac

SEQ ID NO: 2344 - DNA, 20 bp, synthetic construct
  misc_feature 1..20: note = Description of Artificial Sequence: Synthetic oligonucleotide
  misc_feature 1..20: note = Synthetic Construct
  source 1..20: mol_type = other DNA
gacattgatgtctttggggt

SEQ ID NO: 2345 - DNA, 20 bp, synthetic construct
  misc_feature 1..20: note = Description of Artificial Sequence: Synthetic oligonucleotide
  misc_feature 1..20: note = Synthetic Construct
  source 1..20: mol_type = other DNA
ttcactgccatcaatcttcc

SEQ ID NO: 2346 - protein, 117 aa, synthetic construct
  REGION 1..117: note = Description of Artificial Sequence: Synthetic polypeptide
  REGION 1..117: note = Synthetic Construct
EVQLQQSGPELVKPGASVKMSCKASGYTFTDYNMHWVKQSHGKSLEWIGYINPNNGGTTYNQKFKGKATLTVNKSSSTAYMELRSLTSEDSAVYYCATYNNHYFDSWGQGTTLTVSS

SEQ ID NO: 2347 - protein, 10 aa, synthetic construct
  REGION 1..10: note = Description of Artificial Sequence: Synthetic peptide
  REGION 1..10: note = Synthetic Construct
GYTFTDYNMH

SEQ ID NO: 2348 - protein, 17 aa, synthetic construct
  REGION 1..17: note = Description of Artificial Sequence: Synthetic peptide
  REGION 1..17: note = Synthetic Construct
YINPNNGGTTYNQKFKG

SEQ ID NO: 2349 - protein, 10 aa, synthetic construct
  REGION 1..10: note = Description of Artificial Sequence: Synthetic peptide
  REGION 1..10: note = Synthetic Construct
ATYNNHYFDS

SEQ ID NO: 2350 - protein, 107 aa, synthetic construct
  REGION 1..107: note = Description of Artificial Sequence: Synthetic polypeptide
  REGION 1..107: note = Synthetic Construct
DIQMTQTTSSLSASLGDRVTISCSASQGISNYLNWYQQKPDGTVKLLIYYTSNLHSGVPSRFSGSGSGTDYSLTISNLEPEDIATYYCQQYSNLPYTFGGGTKLEIK

SEQ ID NO: 2351 - protein, 11 aa, synthetic construct
  REGION 1..11: note = Description of Artificial Sequence: Synthetic peptide
  REGION 1..11: note = Synthetic Construct
SASQGISNYLN

SEQ ID NO: 2352 - protein, 7 aa, synthetic construct
  REGION 1..7: note = Description of Artificial Sequence: Synthetic peptide
  REGION 1..7: note = Synthetic Construct
YTSNLHS

SEQ ID NO: 2353 - protein, 9 aa, synthetic construct
  REGION 1..9: note = Description of Artificial Sequence: Synthetic peptide
  REGION 1..9: note = Synthetic Construct
QQYSNLPYT

SEQ ID NO: 2354 - protein, 118 aa, synthetic construct
  REGION 1..118: note = Description of Artificial Sequence: Synthetic polypeptide
  REGION 1..118: note = Synthetic Construct
QVHLQQSGPEVVRPGVSVKISCKGSGYTFTDYGMHWVKQSHAKSLEWIGVISTYNGNTSYNQKYKGKATVTVDKPSSTAYMELVRLTSEDSAIYYCARDFGYVPFDYWGQGTTLTVSS

SEQ ID NO: 2355 - protein, 10 aa, synthetic construct
  REGION 1..10: note = Description of Artificial Sequence: Synthetic peptide
  REGION 1..10: note = Synthetic Construct
GYTFTDYGMH

SEQ ID NO: 2356 - protein, 17 aa, synthetic construct
  REGION 1..17: note = Description of Artificial Sequence: Synthetic peptide
  REGION 1..17: note = Synthetic Construct
VISTYNGNTSYNQKYKG

SEQ ID NO: 2357 - protein, 11 aa, synthetic construct
  REGION 1..11: note = Description of Artificial Sequence: Synthetic peptide
  REGION 1..11: note = Synthetic Construct
ARDFGYVPFDY

SEQ ID NO: 2358 - protein, 112 aa, synthetic construct
  REGION 1..112: note = Description of Artificial Sequence: Synthetic polypeptide
  REGION 1..112: note = Synthetic Construct
DVVMTQTPLTLSVTIGQPASISCKSSQSLLDSDGKTYLNWLLQRPGQSPKRLIYLVSYLDSGVPDRFTGSGSGTDFTLKISRVEADDLGVYYCWQGTHFPYTFGGGTKLEIK

SEQ ID NO: 2359 - protein, 7 aa, synthetic construct
  REGION 1..7: note = Description of Artificial Sequence: Synthetic peptide
  REGION 1..7: note = Synthetic Construct
LVSYLDS

SEQ ID NO: 2360-2366 - skipped (7 entries)

SEQ ID NO: 2367 - protein, 15 aa, synthetic construct
  REGION 1..15: note = Description of Artificial Sequence: Synthetic peptide
  REGION 1..15: note = Synthetic Construct
  VARIANT 3: note = Gly or Asn
  VARIANT 4: note = Asp or Gly
  VARIANT 5: note = Asp or Ile
  VARIANT 6: note = Ser or Thr
  VARIANT 7: note = Tyr or Thr
  VARIANT 8: note = Arg or Ala
  VARIANT 9: note = Arg or Gly
  VARIANT 10: note = Gly or Tyr
  VARIANT 13: note = Leu or Met
ARXXXXXXXXYAXDY

SEQ ID NO: 2368 - protein, 17 aa, synthetic construct
  REGION 1..17: note = Description of Artificial Sequence: Synthetic peptide
  REGION 1..17: note = Synthetic Construct
  VARIANT 1: note = Arg or Lys
  VARIANT 4: note = Gln or Lys
  VARIANT 7: note = Val or Leu
  VARIANT 8: note = His, Asp, or Tyr
  VARIANT 9: note = Ile, Asn, or Ser
  VARIANT 10: note = Ser or absent
  VARIANT 11: note = Asp or Asn
  VARIANT 12: note = Gly or Gln
  VARIANT 13: note = Asn, Ile, or Lys
  VARIANT 14: note = Thr or Ser
  VARIANT 15: note = Tyr or Phe
  VARIANT 17: note = Gln, His, Tyr, Asn, or Ala
XSSXSLXXXXBXXXXLX

SEQ ID NO: 2369 - protein, 11 aa, synthetic construct
  REGION 1..11: note = Description of Artificial Sequence: Synthetic peptide
  REGION 1..11: note = Synthetic Construct
  VARIANT 1: note = Arg, Lys, or Ser
  VARIANT 4: note = Glu or Gln
  VARIANT 5: note = Asn, Asp, or Gly
  VARIANT 7: note = Tyr or Ser
  VARIANT 8: note = Ser or Asn
  VARIANT 9: note = Asn, Arg, or Tyr
  VARIANT 11: note = Ala or Asn
XASZXIXXXLX

SEQ ID NO: 2370-2372 - skipped (3 entries)

SEQ ID NO: 2373 - protein, 159 aa, Homo sapiens
SGAHNTTVFQGVAGQSLQVSCPYDSMKHWGRRKAWCRQLGEKGPCQRVVSTHNLWLLSFLRRWNGSTAITDDTLGGTLTITLRNLQPHDAGLYQCQSLHGSEADTLRKVLVEVLADPLDHRDAGDLWFPGESESFEDAHVEHSISRSLLEGEIPFPPTS

SEQ ID NO: 2374 - protein, 10 aa, Homo sapiens
DLWFPGESES

SEQ ID NO: 2375 - protein, 9 aa, Homo sapiens
DLWFPGESE

SEQ ID NO: 2376 - protein, 5 aa, Homo sapiens
DLWFP

SEQ ID NO: 2377 - protein, 217 aa, synthetic construct
  REGION 1..217: note = Description of Artificial Sequence: Synthetic polypeptide
  REGION 1..217: note = Synthetic Construct
APELLGGPSVFLFPPKPKDTLMISRTPEVTCVVVDVSHEDPEVKFNWYVDGVEVHNAKTKPREEQYNSTYRVVSVLTVLHQDWLNGKEYKCKVSNKALPAPIEKTISKAKGQPREPQVYTLPPSRDELTKNQVSLTCLVKGFYPSDIAVEWESWGFVWSTYKTTPPVLDSDGSFFLYSKLTVPKSNWQQGFVFSCSVMHEALHNHYTQKSLSLSPGK

SEQ ID NO: 2378 - protein, 217 aa, synthetic construct
  REGION 1..217: note = Description of Artificial Sequence: Synthetic polypeptide
  REGION 1..217: note = Synthetic Construct
APELLGGPSVFLFPPKPKDTLMISRTPEVTCVVVDVSHEDPEVKFNWYVDGVEVHNAKTKPREEQYNSTYRVVSVLTVLHQDWLNGKEYKCKVSNKALPAPIEKTISKAKGQPREPQVYTLPPSRDELTKNQVSLTCLVKGFYPSDIAVEWESWGHVWSTYKTTPPVLDSDGSFFLYSKLTVPKSNWQQGYVFSCSVMHEALHNHYTQKSLSLSPGK

SEQ ID NO: 2379 - protein, 217 aa, synthetic construct
  REGION 1..217: note = Description of Artificial Sequence: Synthetic polypeptide
  REGION 1..217: note = Synthetic Construct
APELLGGPSVFLFPPKPKDTLMISRTPEVTCVVVDVSHEDPEVKFNWYVDGVEVHNAKTKPREEQYNSTYRVVSVLTVLHQDWLNGKEYKCKVSNKALPAPIEKTISKAKGQPREPQVYTLPPSRDELTKNQVSLTCLVKGFYPSDIAVEWESLGHVWVEQKTTPPVLDSDGSFFLYSKLTVPKSTWQQGWVFSCSVMHEALHNHYTQKSLSLSPGK

SEQ ID NO: 2380 - protein, 217 aa, synthetic construct
  REGION 1..217: note = Description of Artificial Sequence: Synthetic polypeptide
  REGION 1..217: note = Synthetic Construct
APELLGGPSVFLFPPKPKDTLMISRTPEVTCVVVDVSHEDPEVKFNWYVDGVEVHNAKTKPREEQYNSTYRVVSVLTVLHQDWLNGKEYKCKVSNKALPAPIEKTISKAKGQPREPQVYTLPPSRDELTKNQVSLTCLVKGFYPSDIAVEWESLGHVWVGVKTTPPVLDSDGSFFLYSKLTVPKSTWQQGWVFSCSVMHEALHNHYTQKSLSLSPGK

SEQ ID NO: 2381 - protein, 217 aa, synthetic construct
  REGION 1..217: note = Description of Artificial Sequence: Synthetic polypeptide
  REGION 1..217: note = Synthetic Construct
APELLGGPSVFLFPPKPKDTLMISRTPEVTCVVVDVSHEDPEVKFNWYVDGVEVHNAKTKPREEQYNSTYRVVSVLTVLHQDWLNGKEYKCKVSNKALPAPIEKTISKAKGQPREPQVYTLPPSRDELTKNQVSLTCLVKGFYPSDIAVEWESLGHVWVHTKTTPPVLDSDGSFFLYSKLTVPKSTWQQGWVFSCSVMHEALHNHYTQKSLSLSPGK

SEQ ID NO: 2382 - protein, 217 aa, synthetic construct
  REGION 1..217: note = Description of Artificial Sequence: Synthetic polypeptide
  REGION 1..217: note = Synthetic Construct
APELLGGPSVFLFPPKPKDTLMISRTPEVTCVVVDVSHEDPEVKFNWYVDGVEVHNAKTKPREEQYNSTYRVVSVLTVLHQDWLNGKEYKCKVSNKALPAPIEKTISKAKGQPREPQVYTLPPSRDELTKNQVSLTCLVKGFYPSDIAVEWESWGTVWGTYKTTPPVLDSDGSFFLYSKLTVPKSNWQQGYVFSCSVMHEALHNHYTQKSLSLSPGK

SEQ ID NO: 2383 - protein, 217 aa, synthetic construct
  REGION 1..217: note = Description of Artificial Sequence: Synthetic polypeptide
  REGION 1..217: note = Synthetic Construct
APELLGGPSVFLFPPKPKDTLMISRTPEVTCVVVDVSHEDPEVKFNWYVDGVEVHNAKTKPREEQYNSTYRVVSVLTVLHQDWLNGKEYKCKVSNKALPAPIEKTISKAKGQPREPQVYTLPPSRDELTKNQVSLTCLVKGFYPSDIAVEWESLGHVWVGTKTTPPVLDSDGSFFLYSKLTVPKSTWQQGWVFSCSVMHEALHNHYTQKSLSLSPGK

SEQ ID NO: 2384 - protein, 217 aa, synthetic construct
  REGION 1..217: note = Description of Artificial Sequence: Synthetic polypeptide
  REGION 1..217: note = Synthetic Construct
APELLGGPSVFLFPPKPKDTLMISRTPEVTCVVVDVSHEDPEVKFNWYVDGVEVHNAKTKPREEQYNSTYRVVSVLTVLHQDWLNGKEYKCKVSNKALPAPIEKTISKAKGQPREPQVYTLPPSRDELTKNQVSLTCLVKGFYPSDIAVEWESFGTEWSSYKTTPPVLDSDGSFFLYSKLTVSKEEWQQGFVFSCSVMHEALHNHYTQKSLSLSPGK

SEQ ID NO: 2385 - protein, 217 aa, synthetic construct
  REGION 1..217: note = Description of Artificial Sequence: Synthetic polypeptide
  REGION 1..217: note = Synthetic Construct
APELLGGPSVFLFPPKPKDTLMISRTPEVTCVVVDVSHEDPEVKFNWYVDGVEVHNAKTKPREEQYNSTYRVVSVLTVLHQDWLNGKEYKCKVSNKALPAPIEKTISKAKGQPREPQVYTLPPSRDELTKNQVSLTCLVKGFYPSDIAVEWESYGTEWANYKTTPPVLDSDGSFFLYSKLTVSKSEWQQGFVFSCSVMHEALHNHYTQKSLSLSPGK

SEQ ID NO: 2386 - protein, 217 aa, synthetic construct
  REGION 1..217: note = Description of Artificial Sequence: Synthetic polypeptide
  REGION 1..217: note = Synthetic Construct
APELLGGPSVFLFPPKPKDTLMISRTPEVTCVVVDVSHEDPEVKFNWYVDGVEVHNAKTKPREEQYNSTYRVVSVLTVLHQDWLNGKEYKCKVSNKALPAPIEKTISKAKGQPREPQVYTLPPSRDELTKNQVSLTCLVKGFYPSDIAVEWESFGTEWSNYKTTPPVLDSDGSFFLYSKLTVSKEEWQQGFVFSCSVMHEALHNHYTQKSLSLSPGK

SEQ ID NO: 2387 - protein, 217 aa, synthetic construct
  REGION 1..217: note = Description of Artificial Sequence: Synthetic polypeptide
  REGION 1..217: note = Synthetic Construct
APELLGGPSVFLFPPKPKDTLMISRTPEVTCVVVDVSHEDPEVKFNWYVDGVEVHNAKTKPREEQYNSTYRVVSVLTVLHQDWLNGKEYKCKVSNKALPAPIEKTISKAKGQPREPQVYTLPPSRDELTKNQVSLTCLVKGFYPSDIAVEWESYGTEWSSYKTTPPVLDSDGSFFLYSKLTVSKSEWQQGFVFSCSVMHEALHNHYTQKSLSLSPGK

SEQ ID NO: 2388 - protein, 217 aa, synthetic construct
  REGION 1..217: note = Description of Artificial Sequence: Synthetic polypeptide
  REGION 1..217: note = Synthetic Construct
APELLGGPSVFLFPPKPKDTLMISRTPEVTCVVVDVSHEDPEVKFNWYVDGVEVHNAKTKPREEQYNSTYRVVSVLTVLHQDWLNGKEYKCKVSNKALPAPIEKTISKAKGQPREPQVYTLPPSRDELTKNQVSLTCLVKGFYPSDIAVEWESYGTEWVNYKTTPPVLDSDGSFFLYSKLTVSKEEWQQGFVFSCSVMHEALHNHYTQKSLSLSPGK

SEQ ID NO: 2389 - protein, 217 aa, synthetic construct; identical to SEQ ID NO: 2187
  REGION 1..217: note = Description of Artificial Sequence: Synthetic polypeptide
  REGION 1..217: note = Synthetic Construct

SEQ ID NO: 2390 - protein, 217 aa, synthetic construct
  REGION 1..217: note = Description of Artificial Sequence: Synthetic polypeptide
  REGION 1..217: note = Synthetic Construct
APELLGGPSVFLFPPKPKDTLMISRTPEVTCVVVDVSHEDPEVKFNWYVDGVEVHNAKTKPREEQYNSTYRVVSVLTVLHQDWLNGKEYKCKVSNKALPAPIEKTISKAKGQPREPQVYTLPPSRDELTKNQVSLTCLVKGFYPSDIAVEWESFGTEWVNYKTTPPVLDSDGSFFLYSKLTVSKEEWQQGFVFSCSVMHEALHNHYTQKSLSLSPGK

SEQ ID NO: 2391 - protein, 217 aa, synthetic construct
  REGION 1..217: note = Description of Artificial Sequence: Synthetic polypeptide
  REGION 1..217: note = Synthetic Construct
APEAAGGPSVFLFPPKPKDTLMISRTPEVTCVVVDVSHEDPEVKFNWYVDGVEVHNAKTKPREEQYNSTYRVVSVLTVLHQDWLNGKEYKCKVSNKALGAPIEKTISKAKGQPREPQVYTLPPSRDELTKNQVSLWCLVKGFYPSDIAVWWESYGTEWSSYKTTPPVLDSDGSFFLYSKLTVTKEEWQQGFVFSCSVMHEALHNHYTQKSLSLSPGK

SEQ ID NO: 2392 - protein, 217 aa, synthetic construct
  REGION 1..217: note = Description of Artificial Sequence: Synthetic polypeptide
  REGION 1..217: note = Synthetic Construct
APEAAGGPSVFLFPPKPKDTLYITREPEVTCVVVDVSHEDPEVKFNWYVDGVEVHNAKTKPREEQYNSTYRVVSVLTVLHQDWLNGKEYKCKVSNKALGAPIEKTISKAKGQPREPQVYTLPPSRDELTKNQVSLWCLVKGFYPSDIAVWWESYGTEWSSYKTTPPVLDSDGSFFLYSKLTVTKEEWQQGFVFSCSVMHEALHNHYTQKSLSLSPGK

SEQ ID NO: 2393 - protein, 217 aa, synthetic construct
  REGION 1..217: note = Description of Artificial Sequence: Synthetic polypeptide
  REGION 1..217: note = Synthetic Construct
APEAAGGPSVFLFPPKPKDTLMISRTPEVTCVVVDVSHEDPEVKFNWYVDGVEVHNAKTKPREEQYNSTYRVVSVLTVLHQDWLNGKEYKCKVSNKALGAPIEKTISKAKGQPREPQVYTLPPSRDELTKNQVSLSCAVKGFYPSDIAVWWESYGTEWSSYKTTPPVLDSDGSFFLVSKLTVTKEEWQQGFVFSCSVMHEALHNHYTQKSLSLSPGK

SEQ ID NO: 2394 - protein, 217 aa, synthetic construct
  REGION 1..217: note = Description of Artificial Sequence: Synthetic polypeptide
  REGION 1..217: note = Synthetic Construct
APEAAGGPSVFLFPPKPKDTLYITREPEVTCVVVDVSHEDPEVKFNWYVDGVEVHNAKTKPREEQYNSTYRVVSVLTVLHQDWLNGKEYKCKVSNKALGAPIEKTISKAKGQPREPQVYTLPPSRDELTKNQVSLSCAVKGFYPSDIAVWWESYGTEWSSYKTTPPVLDSDGSFFLVSKLTVTKEEWQQGFVFSCSVMHEALHNHYTQKSLSLSPGK

SEQ ID NO: 2395 - protein, 217 aa, synthetic construct
  REGION 1..217: note = Description of Artificial Sequence: Synthetic polypeptide
  REGION 1..217: note = Synthetic Construct
APELLGGPSVFLFPPKPKDTLMISRTPEVTCVVVDVSHEDPEVKFNWYVDGVEVHNAKTKPREEQYNSTYRVVSVLTVLHQDWLNGKEYKCKVSNKALPAPIEKTISKAKGQPREPQVYTLPPSRDELTKNQVSLWCLVKGFYPSDIAVEWESFGTEWSSYKTTPPVLDSDGSFFLYSKLTVSKEEWQQGFVFSCSVMHEALHNHYTQKSLSLSPGK

SEQ ID NO: 2396 - protein, 217 aa, synthetic construct
  REGION 1..217: note = Description of Artificial Sequence: Synthetic polypeptide
  REGION 1..217: note = Synthetic Construct
APEAAGGPSVFLFPPKPKDTLMISRTPEVTCVVVDVSHEDPEVKFNWYVDGVEVHNAKTKPREEQYNSTYRVVSVLTVLHQDWLNGKEYKCKVSNKALPAPIEKTISKAKGQPREPQVYTLPPSRDELTKNQVSLWCLVKGFYPSDIAVEWESFGTEWSSYKTTPPVLDSDGSFFLYSKLTVSKEEWQQGFVFSCSVMHEALHNHYTQKSLSLSPGK

SEQ ID NO: 2397 - protein, 217 aa, synthetic construct
  REGION 1..217: note = Description of Artificial Sequence: Synthetic polypeptide
  REGION 1..217: note = Synthetic Construct
APEAAGGPSVFLFPPKPKDTLMISRTPEVTCVVVDVSHEDPEVKFNWYVDGVEVHNAKTKPREEQYNSTYRVVSVLTVLHQDWLNGKEYKCKVSNKALGAPIEKTISKAKGQPREPQVYTLPPSRDELTKNQVSLWCLVKGFYPSDIAVEWESFGTEWSSYKTTPPVLDSDGSFFLYSKLTVSKEEWQQGFVFSCSVMHEALHNHYTQKSLSLSPGK

SEQ ID NO: 2398 - protein, 217 aa, synthetic construct
  REGION 1..217: note = Description of Artificial Sequence: Synthetic polypeptide
  REGION 1..217: note = Synthetic Construct
APELLGGPSVFLFPPKPKDTLYITREPEVTCVVVDVSHEDPEVKFNWYVDGVEVHNAKTKPREEQYNSTYRVVSVLTVLHQDWLNGKEYKCKVSNKALPAPIEKTISKAKGQPREPQVYTLPPSRDELTKNQVSLWCLVKGFYPSDIAVEWESFGTEWSSYKTTPPVLDSDGSFFLYSKLTVSKEEWQQGFVFSCSVMHEALHNHYTQKSLSLSPGK

SEQ ID NO: 2399 - protein, 217 aa, synthetic construct
  REGION 1..217: note = Description of Artificial Sequence: Synthetic polypeptide
  REGION 1..217: note = Synthetic Construct
APEAAGGPSVFLFPPKPKDTLYITREPEVTCVVVDVSHEDPEVKFNWYVDGVEVHNAKTKPREEQYNSTYRVVSVLTVLHQDWLNGKEYKCKVSNKALPAPIEKTISKAKGQPREPQVYTLPPSRDELTKNQVSLWCLVKGFYPSDIAVEWESFGTEWSSYKTTPPVLDSDGSFFLYSKLTVSKEEWQQGFVFSCSVMHEALHNHYTQKSLSLSPGK

SEQ ID NO: 2400 - protein, 217 aa, synthetic construct
  REGION 1..217: note = Description of Artificial Sequence: Synthetic polypeptide
  REGION 1..217: note = Synthetic Construct
APEAAGGPSVFLFPPKPKDTLYITREPEVTCVVVDVSHEDPEVKFNWYVDGVEVHNAKTKPREEQYNSTYRVVSVLTVLHQDWLNGKEYKCKVSNKALGAPIEKTISKAKGQPREPQVYTLPPSRDELTKNQVSLWCLVKGFYPSDIAVEWESFGTEWSSYKTTPPVLDSDGSFFLYSKLTVSKEEWQQGFVFSCSVMHEALHNHYTQKSLSLSPGK

SEQ ID NO: 2401 - protein, 217 aa, synthetic construct
  REGION 1..217: note = Description of Artificial Sequence: Synthetic polypeptide
  REGION 1..217: note = Synthetic Construct
APELLGGPSVFLFPPKPKDTLMISRTPEVTCVVVDVSHEDPEVKFNWYVDGVEVHNAKTKPREEQYNSTYRVVSVLTVLHQDWLNGKEYKCKVSNKALPAPIEKTISKAKGQPREPQVYTLPPSRDELTKNQVSLSCAVKGFYPSDIAVEWESFGTEWSSYKTTPPVLDSDGSFFLVSKLTVSKEEWQQGFVFSCSVMHEALHNHYTQKSLSLSPGK

SEQ ID NO: 2402 - protein, 217 aa, synthetic construct
  REGION 1..217: note = Description of Artificial Sequence: Synthetic polypeptide
  REGION 1..217: note = Synthetic Construct
APEAAGGPSVFLFPPKPKDTLMISRTPEVTCVVVDVSHEDPEVKFNWYVDGVEVHNAKTKPREEQYNSTYRVVSVLTVLHQDWLNGKEYKCKVSNKALPAPIEKTISKAKGQPREPQVYTLPPSRDELTKNQVSLSCAVKGFYPSDIAVEWESFGTEWSSYKTTPPVLDSDGSFFLVSKLTVSKEEWQQGFVFSCSVMHEALHNHYTQKSLSLSPGK

SEQ ID NO: 2403 - protein, 217 aa, synthetic construct
  REGION 1..217: note = Description of Artificial Sequence: Synthetic polypeptide
  REGION 1..217: note = Synthetic Construct
APEAAGGPSVFLFPPKPKDTLMISRTPEVTCVVVDVSHEDPEVKFNWYVDGVEVHNAKTKPREEQYNSTYRVVSVLTVLHQDWLNGKEYKCKVSNKALGAPIEKTISKAKGQPREPQVYTLPPSRDELTKNQVSLSCAVKGFYPSDIAVEWESFGTEWSSYKTTPPVLDSDGSFFLVSKLTVSKEEWQQGFVFSCSVMHEALHNHYTQKSLSLSPGK

SEQ ID NO: 2404 - protein, 217 aa, synthetic construct
  REGION 1..217: note = Description of Artificial Sequence: Synthetic polypeptide
  REGION 1..217: note = Synthetic Construct
APELLGGPSVFLFPPKPKDTLYITREPEVTCVVVDVSHEDPEVKFNWYVDGVEVHNAKTKPREEQYNSTYRVVSVLTVLHQDWLNGKEYKCKVSNKALPAPIEKTISKAKGQPREPQVYTLPPSRDELTKNQVSLSCAVKGFYPSDIAVEWESFGTEWSSYKTTPPVLDSDGSFFLVSKLTVSKEEWQQGFVFSCSVMHEALHNHYTQKSLSLSPGK

SEQ ID NO: 2405 - protein, 217 aa, synthetic construct
  REGION 1..217: note = Description of Artificial Sequence: Synthetic polypeptide
  REGION 1..217: note = Synthetic Construct
APEAAGGPSVFLFPPKPKDTLYITREPEVTCVVVDVSHEDPEVKFNWYVDGVEVHNAKTKPREEQYNSTYRVVSVLTVLHQDWLNGKEYKCKVSNKALPAPIEKTISKAKGQPREPQVYTLPPSRDELTKNQVSLSCAVKGFYPSDIAVEWESFGTEWSSYKTTPPVLDSDGSFFLVSKLTVSKEEWQQGFVFSCSVMHEALHNHYTQKSLSLSPGK

SEQ ID NO: 2406 - protein, 217 aa, synthetic construct
  REGION 1..217: note = Description of Artificial Sequence: Synthetic polypeptide
  REGION 1..217: note = Synthetic Construct
APEAAGGPSVFLFPPKPKDTLYITREPEVTCVVVDVSHEDPEVKFNWYVDGVEVHNAKTKPREEQYNSTYRVVSVLTVLHQDWLNGKEYKCKVSNKALGAPIEKTISKAKGQPREPQVYTLPPSRDELTKNQVSLSCAVKGFYPSDIAVEWESFGTEWSSYKTTPPVLDSDGSFFLVSKLTVSKEEWQQGFVFSCSVMHEALHNHYTQKSLSLSPGK

SEQ ID NO: 2407 - protein, 217 aa, synthetic construct
  REGION 1..217: note = Description of Artificial Sequence: Synthetic polypeptide
  REGION 1..217: note = Synthetic Construct
APELLGGPSVFLFPPKPKDTLMISRTPEVTCVVVDVSHEDPEVKFNWYVDGVEVHNAKTKPREEQYNSTYRVVSVLTVLHQDWLNGKEYKCKVSNKALPAPIEKTISKAKGQPREPQVYTLPPSRDELTKNQVSLWCLVKGFYPSDIAVEWESYGTEWANYKTTPPVLDSDGSFFLYSKLTVSKSEWQQGFVFSCSVMHEALHNHYTQKSLSLSPGK

SEQ ID NO: 2408 - protein, 217 aa, synthetic construct
  REGION 1..217: note = Description of Artificial Sequence: Synthetic polypeptide
  REGION 1..217: note = Synthetic Construct
APEAAGGPSVFLFPPKPKDTLMISRTPEVTCVVVDVSHEDPEVKFNWYVDGVEVHNAKTKPREEQYNSTYRVVSVLTVLHQDWLNGKEYKCKVSNKALPAPIEKTISKAKGQPREPQVYTLPPSRDELTKNQVSLWCLVKGFYPSDIAVEWESYGTEWANYKTTPPVLDSDGSFFLYSKLTVSKSEWQQGFVFSCSVMHEALHNHYTQKSLSLSPGK

SEQ ID NO: 2409 - protein, 217 aa, synthetic construct
  REGION 1..217: note = Description of Artificial Sequence: Synthetic polypeptide
  REGION 1..217: note = Synthetic Construct
APEAAGGPSVFLFPPKPKDTLMISRTPEVTCVVVDVSHEDPEVKFNWYVDGVEVHNAKTKPREEQYNSTYRVVSVLTVLHQDWLNGKEYKCKVSNKALGAPIEKTISKAKGQPREPQVYTLPPSRDELTKNQVSLWCLVKGFYPSDIAVEWESYGTEWANYKTTPPVLDSDGSFFLYSKLTVSKSEWQQGFVFSCSVMHEALHNHYTQKSLSLSPGK

SEQ ID NO: 2410 - protein, 217 aa, synthetic construct
  REGION 1..217: note = Description of Artificial Sequence: Synthetic polypeptide
  REGION 1..217: note = Synthetic Construct
APELLGGPSVFLFPPKPKDTLYITREPEVTCVVVDVSHEDPEVKFNWYVDGVEVHNAKTKPREEQYNSTYRVVSVLTVLHQDWLNGKEYKCKVSNKALPAPIEKTISKAKGQPREPQVYTLPPSRDELTKNQVSLWCLVKGFYPSDIAVEWESYGTEWANYKTTPPVLDSDGSFFLYSKLTVSKSEWQQGFVFSCSVMHEALHNHYTQKSLSLSPGK

SEQ ID NO: 2411 - protein, 217 aa, synthetic construct
  REGION 1..217: note = Description of Artificial Sequence: Synthetic polypeptide
  REGION 1..217: note = Synthetic Construct
APEAAGGPSVFLFPPKPKDTLYITREPEVTCVVVDVSHEDPEVKFNWYVDGVEVHNAKTKPREEQYNSTYRVVSVLTVLHQDWLNGKEYKCKVSNKALPAPIEKTISKAKGQPREPQVYTLPPSRDELTKNQVSLWCLVKGFYPSDIAVEWESYGTEWANYKTTPPVLDSDGSFFLYSKLTVSKSEWQQGFVFSCSVMHEALHNHYTQKSLSLSPGK

SEQ ID NO: 2412 - protein, 217 aa, synthetic construct
  REGION 1..217: note = Description of Artificial Sequence: Synthetic polypeptide
  REGION 1..217: note = Synthetic Construct
APEAAGGPSVFLFPPKPKDTLYITREPEVTCVVVDVSHEDPEVKFNWYVDGVEVHNAKTKPREEQYNSTYRVVSVLTVLHQDWLNGKEYKCKVSNKALGAPIEKTISKAKGQPREPQVYTLPPSRDELTKNQVSLWCLVKGFYPSDIAVEWESYGTEWANYKTTPPVLDSDGSFFLYSKLTVSKSEWQQGFVFSCSVMHEALHNHYTQKSLSLSPGK

SEQ ID NO: 2413 - protein, 217 aa, synthetic construct
  REGION 1..217: note = Description of Artificial Sequence: Synthetic polypeptide
  REGION 1..217: note = Synthetic Construct
APELLGGPSVFLFPPKPKDTLMISRTPEVTCVVVDVSHEDPEVKFNWYVDGVEVHNAKTKPREEQYNSTYRVVSVLTVLHQDWLNGKEYKCKVSNKALPAPIEKTISKAKGQPREPQVYTLPPSRDELTKNQVSLSCAVKGFYPSDIAVEWESYGTEWANYKTTPPVLDSDGSFFLVSKLTVSKSEWQQGFVFSCSVMHEALHNHYTQKSLSLSPGK

SEQ ID NO: 2414 - protein, 217 aa, synthetic construct
  REGION 1..217: note = Description of Artificial Sequence: Synthetic polypeptide
  REGION 1..217: note = Synthetic Construct
APEAAGGPSVFLFPPKPKDTLMISRTPEVTCVVVDVSHEDPEVKFNWYVDGVEVHNAKTKPREEQYNSTYRVVSVLTVLHQDWLNGKEYKCKVSNKALPAPIEKTISKAKGQPREPQVYTLPPSRDELTKNQVSLSCAVKGFYPSDIAVEWESYGTEWANYKTTPPVLDSDGSFFLVSKLTVSKSEWQQGFVFSCSVMHEALHNHYTQKSLSLSPGK

SEQ ID NO: 2415 - protein, 217 aa, synthetic construct
  REGION 1..217: note = Description of Artificial Sequence: Synthetic polypeptide
  REGION 1..217: note = Synthetic Construct
APEAAGGPSVFLFPPKPKDTLMISRTPEVTCVVVDVSHEDPEVKFNWYVDGVEVHNAKTKPREEQYNSTYRVVSVLTVLHQDWLNGKEYKCKVSNKALGAPIEKTISKAKGQPREPQVYTLPPSRDELTKNQVSLSCAVKGFYPSDIAVEWESYGTEWANYKTTPPVLDSDGSFFLVSKLTVSKSEWQQGFVFSCSVMHEALHNHYTQKSLSLSPGK

SEQ ID NO: 2416 - protein, 217 aa, synthetic construct
  REGION 1..217: note = Description of Artificial Sequence: Synthetic polypeptide
  REGION 1..217: note = Synthetic Construct
APELLGGPSVFLFPPKPKDTLYITREPEVTCVVVDVSHEDPEVKFNWYVDGVEVHNAKTKPREEQYNSTYRVVSVLTVLHQDWLNGKEYKCKVSNKALPAPIEKTISKAKGQPREPQVYTLPPSRDELTKNQVSLSCAVKGFYPSDIAVEWESYGTEWANYKTTPPVLDSDGSFFLVSKLTVSKSEWQQGFVFSCSVMHEALHNHYTQKSLSLSPGK

SEQ ID NO: 2417 - protein, 217 aa, synthetic construct
  REGION 1..217: note = Description of Artificial Sequence: Synthetic polypeptide
  REGION 1..217: note = Synthetic Construct
APEAAGGPSVFLFPPKPKDTLYITREPEVTCVVVDVSHEDPEVKFNWYVDGVEVHNAKTKPREEQYNSTYRVVSVLTVLHQDWLNGKEYKCKVSNKALPAPIEKTISKAKGQPREPQVYTLPPSRDELTKNQVSLSCAVKGFYPSDIAVEWESYGTEWANYKTTPPVLDSDGSFFLVSKLTVSKSEWQQGFVFSCSVMHEALHNHYTQKSLSLSPGK

SEQ ID NO: 2418 - protein, 217 aa, synthetic construct
  REGION 1..217: note = Description of Artificial Sequence: Synthetic polypeptide
  REGION 1..217: note = Synthetic Construct
APEAAGGPSVFLFPPKPKDTLYITREPEVTCVVVDVSHEDPEVKFNWYVDGVEVHNAKTKPREEQYNSTYRVVSVLTVLHQDWLNGKEYKCKVSNKALGAPIEKTISKAKGQPREPQVYTLPPSRDELTKNQVSLSCAVKGFYPSDIAVEWESYGTEWANYKTTPPVLDSDGSFFLVSKLTVSKSEWQQGFVFSCSVMHEALHNHYTQKSLSLSPGK

SEQ ID NO: 2419 - protein, 217 aa, synthetic construct
  REGION 1..217: note = Description of Artificial Sequence: Synthetic polypeptide
  REGION 1..217: note = Synthetic Construct
APELLGGPSVFLFPPKPKDTLMISRTPEVTCVVVDVSHEDPEVKFNWYVDGVEVHNAKTKPREEQYNSTYRVVSVLTVLHQDWLNGKEYKCKVSNKALPAPIEKTISKAKGQPREPQVYTLPPSRDELTKNQVSLWCLVKGFYPSDIAVEWESFGTEWSNYKTTPPVLDSDGSFFLYSKLTVSKEEWQQGFVFSCSVMHEALHNHYTQKSLSLSPGK

SEQ ID NO: 2420 - protein, 217 aa, synthetic construct
  REGION 1..217: note = Description of Artificial Sequence: Synthetic polypeptide
  REGION 1..217: note = Synthetic Construct
APEAAGGPSVFLFPPKPKDTLMISRTPEVTCVVVDVSHEDPEVKFNWYVDGVEVHNAKTKPREEQYNSTYRVVSVLTVLHQDWLNGKEYKCKVSNKALPAPIEKTISKAKGQPREPQVYTLPPSRDELTKNQVSLWCLVKGFYPSDIAVEWESFGTEWSNYKTTPPVLDSDGSFFLYSKLTVSKEEWQQGFVFSCSVMHEALHNHYTQKSLSLSPGK

SEQ ID NO: 2421 - protein, 217 aa, synthetic construct
  REGION 1..217: note = Description of Artificial Sequence: Synthetic polypeptide
  REGION 1..217: note = Synthetic Construct
APEAAGGPSVFLFPPKPKDTLMISRTPEVTCVVVDVSHEDPEVKFNWYVDGVEVHNAKTKPREEQYNSTYRVVSVLTVLHQDWLNGKEYKCKVSNKALGAPIEKTISKAKGQPREPQVYTLPPSRDELTKNQVSLWCLVKGFYPSDIAVEWESFGTEWSNYKTTPPVLDSDGSFFLYSKLTVSKEEWQQGFVFSCSVMHEALHNHYTQKSLSLSPGK

SEQ ID NO: 2422 - protein, 217 aa, synthetic construct
  REGION 1..217: note = Description of Artificial Sequence: Synthetic polypeptide
  REGION 1..217: note = Synthetic Construct
APELLGGPSVFLFPPKPKDTLYITREPEVTCVVVDVSHEDPEVKFNWYVDGVEVHNAKTKPREEQYNSTYRVVSVLTVLHQDWLNGKEYKCKVSNKALPAPIEKTISKAKGQPREPQVYTLPPSRDELTKNQVSLWCLVKGFYPSDIAVEWESFGTEWSNYKTTPPVLDSDGSFFLYSKLTVSKEEWQQGFVFSCSVMHEALHNHYTQKSLSLSPGK

SEQ ID NO: 2423 - protein, 217 aa, synthetic construct
  REGION 1..217: note = Description of Artificial Sequence: Synthetic polypeptide
  REGION 1..217: note = Synthetic Construct
APEAAGGPSVFLFPPKPKDTLYITREPEVTCVVVDVSHEDPEVKFNWYVDGVEVHNAKTKPREEQYNSTYRVVSVLTVLHQDWLNGKEYKCKVSNKALPAPIEKTISKAKGQPREPQVYTLPPSRDELTKNQVSLWCLVKGFYPSDIAVEWESFGTEWSNYKTTPPVLDSDGSFFLYSKLTVSKEEWQQGFVFSCSVMHEALHNHYTQKSLSLSPGK

SEQ ID NO: 2424 - protein, 217 aa, synthetic construct
  REGION 1..217: note = Description of Artificial Sequence: Synthetic polypeptide
  REGION 1..217: note = Synthetic Construct
APEAAGGPSVFLFPPKPKDTLYITREPEVTCVVVDVSHEDPEVKFNWYVDGVEVHNAKTKPREEQYNSTYRVVSVLTVLHQDWLNGKEYKCKVSNKALGAPIEKTISKAKGQPREPQVYTLPPSRDELTKNQVSLWCLVKGFYPSDIAVEWESFGTEWSNYKTTPPVLDSDGSFFLYSKLTVSKEEWQQGFVFSCSVMHEALHNHYTQKSLSLSPGK

SEQ ID NO: 2425 - protein, 217 aa, synthetic construct
  REGION 1..217: note = Description of Artificial Sequence: Synthetic polypeptide
  REGION 1..217: note = Synthetic Construct
APELLGGPSVFLFPPKPKDTLMISRTPEVTCVVVDVSHEDPEVKFNWYVDGVEVHNAKTKPREEQYNSTYRVVSVLTVLHQDWLNGKEYKCKVSNKALPAPIEKTISKAKGQPREPQVYTLPPSRDELTKNQVSLSCAVKGFYPSDIAVEWESFGTEWSNYKTTPPVLDSDGSFFLVSKLTVSKEEWQQGFVFSCSVMHEALHNHYTQKSLSLSPGK

SEQ ID NO: 2426 - protein, 217 aa, synthetic construct
  REGION 1..217: note = Description of Artificial Sequence: Synthetic polypeptide
  REGION 1..217: note = Synthetic Construct
APEAAGGPSVFLFPPKPKDTLMISRTPEVTCVVVDVSHEDPEVKFNWYVDGVEVHNAKTKPREEQYNSTYRVVSVLTVLHQDWLNGKEYKCKVSNKALPAPIEKTISKAKGQPREPQVYTLPPSRDELTKNQVSLSCAVKGFYPSDIAVEWESFGTEWSNYKTTPPVLDSDGSFFLVSKLTVSKEEWQQGFVFSCSVMHEALHNHYTQKSLSLSPGK

SEQ ID NO: 2427 - protein, 217 aa, synthetic construct
  REGION 1..217: note = Description of Artificial Sequence: Synthetic polypeptide
  REGION 1..217: note = Synthetic Construct
APEAAGGPSVFLFPPKPKDTLMISRTPEVTCVVVDVSHEDPEVKFNWYVDGVEVHNAKTKPREEQYNSTYRVVSVLTVLHQDWLNGKEYKCKVSNKALGAPIEKTISKAKGQPREPQVYTLPPSRDELTKNQVSLSCAVKGFYPSDIAVEWESFGTEWSNYKTTPPVLDSDGSFFLVSKLTVSKEEWQQGFVFSCSVMHEALHNHYTQKSLSLSPGK

SEQ ID NO: 2428 - protein, 217 aa, synthetic construct
  REGION 1..217: note = Description of Artificial Sequence: Synthetic polypeptide
  REGION 1..217: note = Synthetic Construct
APELLGGPSVFLFPPKPKDTLYITREPEVTCVVVDVSHEDPEVKFNWYVDGVEVHNAKTKPREEQYNSTYRVVSVLTVLHQDWLNGKEYKCKVSNKALPAPIEKTISKAKGQPREPQVYTLPPSRDELTKNQVSLSCAVKGFYPSDIAVEWESFGTEWSNYKTTPPVLDSDGSFFLVSKLTVSKEEWQQGFVFSCSVMHEALHNHYTQKSLSLSPGK

SEQ ID NO: 2429 - protein, 217 aa, synthetic construct
  REGION 1..217: note = Description of Artificial Sequence: Synthetic polypeptide
  REGION 1..217: note = Synthetic Construct
APEAAGGPSVFLFPPKPKDTLYITREPEVTCVVVDVSHEDPEVKFNWYVDGVEVHNAKTKPREEQYNSTYRVVSVLTVLHQDWLNGKEYKCKVSNKALPAPIEKTISKAKGQPREPQVYTLPPSRDELTKNQVSLSCAVKGFYPSDIAVEWESFGTEWSNYKTTPPVLDSDGSFFLVSKLTVSKEEWQQGFVFSCSVMHEALHNHYTQKSLSLSPGK

SEQ ID NO: 2430 - protein, 217 aa, synthetic construct
  REGION 1..217: note = Description of Artificial Sequence: Synthetic polypeptide
  REGION 1..217: note = Synthetic Construct
APEAAGGPSVFLFPPKPKDTLYITREPEVTCVVVDVSHEDPEVKFNWYVDGVEVHNAKTKPREEQYNSTYRVVSVLTVLHQDWLNGKEYKCKVSNKALGAPIEKTISKAKGQPREPQVYTLPPSRDELTKNQVSLSCAVKGFYPSDIAVEWESFGTEWSNYKTTPPVLDSDGSFFLVSKLTVSKEEWQQGFVFSCSVMHEALHNHYTQKSLSLSPGK

SEQ ID NO: 2431 - protein, 217 aa, synthetic construct
  REGION 1..217: note = Description of Artificial Sequence: Synthetic polypeptide
  REGION 1..217: note = Synthetic Construct
APELLGGPSVFLFPPKPKDTLMISRTPEVTCVVVDVSHEDPEVKFNWYVDGVEVHNAKTKPREEQYNSTYRVVSVLTVLHQDWLNGKEYKCKVSNKALPAPIEKTISKAKGQPREPQVYTLPPSRDELTKNQVSLTCLVKGFYPSDIAVEWESFGTEWSSYKTTPPVLDSDGSFFLYSKLTVTKEEWQQGFVFSCSVLHEALHSHYTQKSLSLSPGK

SEQ ID NO: 2432 - protein, 217 aa, synthetic construct
  REGION 1..217: note = Description of Artificial Sequence: Synthetic polypeptide
  REGION 1..217: note = Synthetic Construct
APELLGGPSVFLFPPKPKDTLMISRTPEVTCVVVDVSHEDPEVKFNWYVDGVEVHNAKTKPREEQYNSTYRVVSVLTVLHQDWLNGKEYKCKVSNKALPAPIEKTISKAKGQPREPQVYTLPPSRDELTKNQVSLWCLVKGFYPSDIAVEWESFGTEWSSYKTTPPVLDSDGSFFLYSKLTVTKEEWQQGFVFSCSVLHEALHSHYTQKSLSLSPGK

SEQ ID NO: 2433 - protein, 217 aa, synthetic construct
  REGION 1..217: note = Description of Artificial Sequence: Synthetic polypeptide
  REGION 1..217: note = Synthetic Construct
APEAAGGPSVFLFPPKPKDTLMISRTPEVTCVVVDVSHEDPEVKFNWYVDGVEVHNAKTKPREEQYNSTYRVVSVLTVLHQDWLNGKEYKCKVSNKALPAPIEKTISKAKGQPREPQVYTLPPSRDELTKNQVSLWCLVKGFYPSDIAVEWESFGTEWSSYKTTPPVLDSDGSFFLYSKLTVTKEEWQQGFVFSCSVLHEALHSHYTQKSLSLSPGK

SEQ ID NO: 2434 - protein, 217 aa, synthetic construct
  REGION 1..217: note = Description of Artificial Sequence: Synthetic polypeptide
  REGION 1..217: note = Synthetic Construct
APEAAGGPSVFLFPPKPKDTLMISRTPEVTCVVVDVSHEDPEVKFNWYVDGVEVHNAKTKPREEQYNSTYRVVSVLTVLHQDWLNGKEYKCKVSNKALGAPIEKTISKAKGQPREPQVYTLPPSRDELTKNQVSLWCLVKGFYPSDIAVEWESFGTEWSSYKTTPPVLDSDGSFFLYSKLTVTKEEWQQGFVFSCSVLHEALHSHYTQKSLSLSPGK

SEQ ID NO: 2435 - protein, 217 aa, synthetic construct
  REGION 1..217: note = Description of Artificial Sequence: Synthetic polypeptide
  REGION 1..217: note = Synthetic Construct
APELLGGPSVFLFPPKPKDTLMISRTPEVTCVVVDVSHEDPEVKFNWYVDGVEVHNAKTKPREEQYNSTYRVVSVLTVLHQDWLNGKEYKCKVSNKALPAPIEKTISKAKGQPREPQVYTLPPSRDELTKNQVSLSCAVKGFYPSDIAVEWESFGTEWSSYKTTPPVLDSDGSFFLVSKLTVTKEEWQQGFVFSCSVLHEALHSHYTQKSLSLSPGK

SEQ ID NO: 2436 - protein, 217 aa, synthetic construct
  REGION 1..217: note = Description of Artificial Sequence: Synthetic polypeptide
  REGION 1..217: note = Synthetic Construct
APEAAGGPSVFLFPPKPKDTLMISRTPEVTCVVVDVSHEDPEVKFNWYVDGVEVHNAKTKPREEQYNSTYRVVSVLTVLHQDWLNGKEYKCKVSNKALPAPIEKTISKAKGQPREPQVYTLPPSRDELTKNQVSLSCAVKGFYPSDIAVEWESFGTEWSSYKTTPPVLDSDGSFFLVSKLTVTKEEWQQGFVFSCSVLHEALHSHYTQKSLSLSPGK

SEQ ID NO: 2437 - protein, 217 aa, synthetic construct
  REGION 1..217: note = Description of Artificial Sequence: Synthetic polypeptide
  REGION 1..217: note = Synthetic Construct
APEAAGGPSVFLFPPKPKDTLMISRTPEVTCVVVDVSHEDPEVKFNWYVDGVEVHNAKTKPREEQYNSTYRVVSVLTVLHQDWLNGKEYKCKVSNKALGAPIEKTISKAKGQPREPQVYTLPPSRDELTKNQVSLSCAVKGFYPSDIAVEWESFGTEWSSYKTTPPVLDSDGSFFLVSKLTVTKEEWQQGFVFSCSVLHEALHSHYTQKSLSLSPGK

SEQ ID NO: 2438 - protein, 217 aa, synthetic construct
  REGION 1..217: note = Description of Artificial Sequence: Synthetic polypeptide
  REGION 1..217: note = Synthetic Construct
APELLGGPSVFLFPPKPKDTLMISRTPEVTCVVVDVSHEDPEVKFNWYVDGVEVHNAKTKPREEQYNSTYRVVSVLTVLHQDWLNGKEYKCKVSNKALPAPIEKTISKAKGQPREPQVYTLPPSRDELTKNQVSLTCLVKGFYPSDIAVEWESFGTEWSSYKTTPPVLDSDGSFFLYSKLTVSKEEWQQGFVFSCSVLHEALHSHYTQKSLSLSPGK

SEQ ID NO: 2439 - protein, 217 aa, synthetic construct
  REGION 1..217: note = Description of Artificial Sequence: Synthetic polypeptide
  REGION 1..217: note = Synthetic Construct
APELLGGPSVFLFPPKPKDTLMISRTPEVTCVVVDVSHEDPEVKFNWYVDGVEVHNAKTKPREEQYNSTYRVVSVLTVLHQDWLNGKEYKCKVSNKALPAPIEKTISKAKGQPREPQVYTLPPSRDELTKNQVSLWCLVKGFYPSDIAVEWESFGTEWSSYKTTPPVLDSDGSFFLYSKLTVSKEEWQQGFVFSCSVLHEALHSHYTQKSLSLSPGK

SEQ ID NO: 2440 - protein, 217 aa, synthetic construct
  REGION 1..217: note = Description of Artificial Sequence: Synthetic polypeptide
  REGION 1..217: note = Synthetic Construct
APEAAGGPSVFLFPPKPKDTLMISRTPEVTCVVVDVSHEDPEVKFNWYVDGVEVHNAKTKPREEQYNSTYRVVSVLTVLHQDWLNGKEYKCKVSNKALPAPIEKTISKAKGQPREPQVYTLPPSRDELTKNQVSLWCLVKGFYPSDIAVEWESFGTEWSSYKTTPPVLDSDGSFFLYSKLTVSKEEWQQGFVFSCSVLHEALHSHYTQKSLSLSPGK

SEQ ID NO: 2441 - protein, 217 aa, synthetic construct
  REGION 1..217: note = Description of Artificial Sequence: Synthetic polypeptide
  REGION 1..217: note = Synthetic Construct
APEAAGGPSVFLFPPKPKDTLMISRTPEVTCVVVDVSHEDPEVKFNWYVDGVEVHNAKTKPREEQYNSTYRVVSVLTVLHQDWLNGKEYKCKVSNKALGAPIEKTISKAKGQPREPQVYTLPPSRDELTKNQVSLWCLVKGFYPSDIAVEWESFGTEWSSYKTTPPVLDSDGSFFLYSKLTVSKEEWQQGFVFSCSVLHEALHSHYTQKSLSLSPGK

SEQ ID NO: 2442 - protein, 217 aa, synthetic construct
  REGION 1..217: note = Description of Artificial Sequence: Synthetic polypeptide
  REGION 1..217: note = Synthetic Construct
APELLGGPSVFLFPPKPKDTLMISRTPEVTCVVVDVSHEDPEVKFNWYVDGVEVHNAKTKPREEQYNSTYRVVSVLTVLHQDWLNGKEYKCKVSNKALPAPIEKTISKAKGQPREPQVYTLPPSRDELTKNQVSLSCAVKGFYPSDIAVEWESFGTEWSSYKTTPPVLDSDGSFFLVSKLTVSKEEWQQGFVFSCSVLHEALHSHYTQKSLSLSPGK

SEQ ID NO: 2443 - protein, 217 aa, synthetic construct
  REGION 1..217: note = Description of Artificial Sequence: Synthetic polypeptide
  REGION 1..217: note = Synthetic Construct
APEAAGGPSVFLFPPKPKDTLMISRTPEVTCVVVDVSHEDPEVKFNWYVDGVEVHNAKTKPREEQYNSTYRVVSVLTVLHQDWLNGKEYKCKVSNKALPAPIEKTISKAKGQPREPQVYTLPPSRDELTKNQVSLSCAVKGFYPSDIAVEWESFGTEWSSYKTTPPVLDSDGSFFLVSKLTVSKEEWQQGFVFSCSVLHEALHSHYTQKSLSLSPGK

SEQ ID NO: 2444 - protein, 217 aa, synthetic construct
  REGION 1..217: note = Description of Artificial Sequence: Synthetic polypeptide
  REGION 1..217: note = Synthetic Construct
APEAAGGPSVFLFPPKPKDTLMISRTPEVTCVVVDVSHEDPEVKFNWYVDGVEVHNAKTKPREEQYNSTYRVVSVLTVLHQDWLNGKEYKCKVSNKALGAPIEKTISKAKGQPREPQVYTLPPSRDELTKNQVSLSCAVKGFYPSDIAVEWESFGTEWSSYKTTPPVLDSDGSFFLVSKLTVSKEEWQQGFVFSCSVLHEALHSHYTQKSLSLSPGK

SEQ ID NO: 2445 - protein, 217 aa, synthetic construct
  REGION 1..217: note = Description of Artificial Sequence: Synthetic polypeptide
  REGION 1..217: note = Synthetic Construct
APELLGGPSVFLFPPKPKDTLMISRTPEVTCVVVDVSHEDPEVKFNWYVDGVEVHNAKTKPREEQYNSTYRVVSVLTVLHQDWLNGKEYKCKVSNKALPAPIEKTISKAKGQPREPQVYTLPPSRDELTKNQVSLTCLVKGFYPSDIAVWWESYGTEWSSYKTTPPVLDSDGSFFLYSKLTVTKEEWQQGFVFSCSVLHEALHSHYTQKSLSLSPGK

SEQ ID NO: 2446 - protein, 217 aa, synthetic construct
  REGION 1..217: note = Description of Artificial Sequence: Synthetic polypeptide
  REGION 1..217: note = Synthetic Construct
APELLGGPSVFLFPPKPKDTLMISRTPEVTCVVVDVSHEDPEVKFNWYVDGVEVHNAKTKPREEQYNSTYRVVSVLTVLHQDWLNGKEYKCKVSNKALPAPIEKTISKAKGQPREPQVYTLPPSRDELTKNQVSLWCLVKGFYPSDIAVWWESYGTEWSSYKTTPPVLDSDGSFFLYSKLTVTKEEWQQGFVFSCSVLHEALHSHYTQKSLSLSPGK

SEQ ID NO: 2447 - protein, 217 aa, synthetic construct
  REGION 1..217: note = Description of Artificial Sequence: Synthetic polypeptide
  REGION 1..217: note = Synthetic Construct
APEAAGGPSVFLFPPKPKDTLMISRTPEVTCVVVDVSHEDPEVKFNWYVDGVEVHNAKTKPREEQYNSTYRVVSVLTVLHQDWLNGKEYKCKVSNKALPAPIEKTISKAKGQPREPQVYTLPPSRDELTKNQVSLWCLVKGFYPSDIAVWWESYGTEWSSYKTTPPVLDSDGSFFLYSKLTVTKEEWQQGFVFSCSVLHEALHSHYTQKSLSLSPGK

SEQ ID NO: 2448 - protein, 217 aa, synthetic construct
  REGION 1..217: note = Description of Artificial Sequence: Synthetic polypeptide
  REGION 1..217: note = Synthetic Construct
APEAAGGPSVFLFPPKPKDTLMISRTPEVTCVVVDVSHEDPEVKFNWYVDGVEVHNAKTKPREEQYNSTYRVVSVLTVLHQDWLNGKEYKCKVSNKALGAPIEKTISKAKGQPREPQVYTLPPSRDELTKNQVSLWCLVKGFYPSDIAVWWESYGTEWSSYKTTPPVLDSDGSFFLYSKLTVTKEEWQQGFVFSCSVLHEALHSHYTQKSLSLSPGK

SEQ ID NO: 2449 - protein, 217 aa, synthetic construct
  REGION 1..217: note = Description of Artificial Sequence: Synthetic polypeptide
  REGION 1..217: note = Synthetic Construct
APELLGGPSVFLFPPKPKDTLMISRTPEVTCVVVDVSHEDPEVKFNWYVDGVEVHNAKTKPREEQYNSTYRVVSVLTVLHQDWLNGKEYKCKVSNKALPAPIEKTISKAKGQPREPQVYTLPPSRDELTKNQVSLSCAVKGFYPSDIAVWWESYGTEWSSYKTTPPVLDSDGSFFLVSKLTVTKEEWQQGFVFSCSVLHEALHSHYTQKSLSLSPGK

SEQ ID NO: 2450 - protein, 217 aa, synthetic construct
  REGION 1..217: note = Description of Artificial Sequence: Synthetic polypeptide
  REGION 1..217: note = Synthetic Construct
APEAAGGPSVFLFPPKPKDTLMISRTPEVTCVVVDVSHEDPEVKFNWYVDGVEVHNAKTKPREEQYNSTYRVVSVLTVLHQDWLNGKEYKCKVSNKALPAPIEKTISKAKGQPREPQVYTLPPSRDELTKNQVSLSCAVKGFYPSDIAVWWESYGTEWSSYKTTPPVLDSDGSFFLVSKLTVTKEEWQQGFVFSCSVLHEALHSHYTQKSLSLSPGK

SEQ ID NO: 2451 - protein, 217 aa, synthetic construct
  REGION 1..217: note = Description of Artificial Sequence: Synthetic polypeptide
  REGION 1..217: note = Synthetic Construct
APEAAGGPSVFLFPPKPKDTLMISRTPEVTCVVVDVSHEDPEVKFNWYVDGVEVHNAKTKPREEQYNSTYRVVSVLTVLHQDWLNGKEYKCKVSNKALGAPIEKTISKAKGQPREPQVYTLPPSRDELTKNQVSLSCAVKGFYPSDIAVWWESYGTEWSSYKTTPPVLDSDGSFFLVSKLTVTKEEWQQGFVFSCSVLHEALHSHYTQKSLSLSPGK

SEQ ID NO: 2452 - protein, 217 aa, synthetic construct
  REGION 1..217: note = Description of Artificial Sequence: Synthetic polypeptide
  REGION 1..217: note = Synthetic Construct
APELLGGPSVFLFPPKPKDTLMISRTPEVTCVVVDVSHEDPEVKFNWYVDGVEVHNAKTKPREEQYNSTYRVVSVLTVLHQDWLNGKEYKCKVSNKALPAPIEKTISKAKGQPREPQVYTLPPSRDELTKNQVSLTCLVKGFYPSDIAVLWESYGTEWASYKTTPPVLDSDGSFFLYSKLTVTKEEWQQGFVFSCSVLHEALHSHYTQKSLSLSPGK

SEQ ID NO: 2453 - protein, 217 aa, synthetic construct
  REGION 1..217: note = Description of Artificial Sequence: Synthetic polypeptide
  REGION 1..217: note = Synthetic Construct
APELLGGPSVFLFPPKPKDTLMISRTPEVTCVVVDVSHEDPEVKFNWYVDGVEVHNAKTKPREEQYNSTYRVVSVLTVLHQDWLNGKEYKCKVSNKALPAPIEKTISKAKGQPREPQVYTLPPSRDELTKNQVSLWCLVKGFYPSDIAVLWESYGTEWASYKTTPPVLDSDGSFFLYSKLTVTKEEWQQGFVFSCSVLHEALHSHYTQKSLSLSPGK

SEQ ID NO: 2454 - protein, 217 aa, synthetic construct
  REGION 1..217: note = Description of Artificial Sequence: Synthetic polypeptide
  REGION 1..217: note = Synthetic Construct
APEAAGGPSVFLFPPKPKDTLMISRTPEVTCVVVDVSHEDPEVKFNWYVDGVEVHNAKTKPREEQYNSTYRVVSVLTVLHQDWLNGKEYKCKVSNKALPAPIEKTISKAKGQPREPQVYTLPPSRDELTKNQVSLWCLVKGFYPSDIAVLWESYGTEWASYKTTPPVLDSDGSFFLYSKLTVTKEEWQQGFVFSCSVLHEALHSHYTQKSLSLSPGK

SEQ ID NO: 2455 - protein, 217 aa, synthetic construct
  REGION 1..217: note = Description of Artificial Sequence: Synthetic polypeptide
  REGION 1..217: note = Synthetic Construct
APEAAGGPSVFLFPPKPKDTLMISRTPEVTCVVVDVSHEDPEVKFNWYVDGVEVHNAKTKPREEQYNSTYRVVSVLTVLHQDWLNGKEYKCKVSNKALGAPIEKTISKAKGQPREPQVYTLPPSRDELTKNQVSLWCLVKGFYPSDIAVLWESYGTEWASYKTTPPVLDSDGSFFLYSKLTVTKEEWQQGFVFSCSVLHEALHSHYTQKSLSLSPGK

SEQ ID NO: 2456 - protein, 217 aa, synthetic construct
  REGION 1..217: note = Description of Artificial Sequence: Synthetic polypeptide
  REGION 1..217: note = Synthetic Construct
APELLGGPSVFLFPPKPKDTLMISRTPEVTCVVVDVSHEDPEVKFNWYVDGVEVHNAKTKPREEQYNSTYRVVSVLTVLHQDWLNGKEYKCKVSNKALPAPIEKTISKAKGQPREPQVYTLPPSRDELTKNQVSLSCAVKGFYPSDIAVLWESYGTEWASYKTTPPVLDSDGSFFLVSKLTVTKEEWQQGFVFSCSVLHEALHSHYTQKSLSLSPGK

SEQ ID NO: 2457 - protein, 217 aa, synthetic construct
  REGION 1..217: note = Description of Artificial Sequence: Synthetic polypeptide
  REGION 1..217: note = Synthetic Construct
APEAAGGPSVFLFPPKPKDTLMISRTPEVTCVVVDVSHEDPEVKFNWYVDGVEVHNAKTKPREEQYNSTYRVVSVLTVLHQDWLNGKEYKCKVSNKALPAPIEKTISKAKGQPREPQVYTLPPSRDELTKNQVSLSCAVKGFYPSDIAVLWESYGTEWASYKTTPPVLDSDGSFFLVSKLTVTKEEWQQGFVFSCSVLHEALHSHYTQKSLSLSPGK

SEQ ID NO: 2458 - protein, 217 aa, synthetic construct
  REGION 1..217: note = Description of Artificial Sequence: Synthetic polypeptide
  REGION 1..217: note = Synthetic Construct
APEAAGGPSVFLFPPKPKDTLMISRTPEVTCVVVDVSHEDPEVKFNWYVDGVEVHNAKTKPREEQYNSTYRVVSVLTVLHQDWLNGKEYKCKVSNKALGAPIEKTISKAKGQPREPQVYTLPPSRDELTKNQVSLSCAVKGFYPSDIAVLWESYGTEWASYKTTPPVLDSDGSFFLVSKLTVTKEEWQQGFVFSCSVLHEALHSHYTQKSLSLSPGK

SEQ ID NO: 2459 - protein, 217 aa, synthetic construct
  REGION 1..217: note = Description of Artificial Sequence: Synthetic polypeptide
  REGION 1..217: note = Synthetic Construct
APELLGGPSVFLFPPKPKDTLMISRTPEVTCVVVDVSHEDPEVKFNWYVDGVEVHNAKTKPREEQYNSTYRVVSVLTVLHQDWLNGKEYKCKVSNKALPAPIEKTISKAKGQPREPQVYTLPPSRDELTKNQVSLTCLVKGFYPSDIAVEWESYGTEWSNYKTTPPVLDSDGSFFLYSKLTVTKEEWQQGFVFSCSVLHEALHSHYTQKSLSLSPGK

SEQ ID NO: 2460 - protein, 217 aa, synthetic construct
  REGION 1..217: note = Description of Artificial Sequence: Synthetic polypeptide
  REGION 1..217: note = Synthetic Construct
APELLGGPSVFLFPPKPKDTLMISRTPEVTCVVVDVSHEDPEVKFNWYVDGVEVHNAKTKPREEQYNSTYRVVSVLTVLHQDWLNGKEYKCKVSNKALPAPIEKTISKAKGQPREPQVYTLPPSRDELTKNQVSLWCLVKGFYPSDIAVEWESYGTEWSNYKTTPPVLDSDGSFFLYSKLTVTKEEWQQGFVFSCSVLHEALHSHYTQKSLSLSPGK

SEQ ID NO: 2461 - protein, 217 aa, synthetic construct
  REGION 1..217: note = Description of Artificial Sequence: Synthetic polypeptide
  REGION 1..217: note = Synthetic Construct
APEAAGGPSVFLFPPKPKDTLMISRTPEVTCVVVDVSHEDPEVKFNWYVDGVEVHNAKTKPREEQYNSTYRVVSVLTVLHQDWLNGKEYKCKVSNKALPAPIEKTISKAKGQPREPQVYTLPPSRDELTKNQVSLWCLVKGFYPSDIAVEWESYGTEWSNYKTTPPVLDSDGSFFLYSKLTVTKEEWQQGFVFSCSVLHEALHSHYTQKSLSLSPGK

SEQ ID NO: 2462 - protein, 217 aa, synthetic construct
  REGION 1..217: note = Description of Artificial Sequence: Synthetic polypeptide
  REGION 1..217: note = Synthetic Construct
APEAAGGPSVFLFPPKPKDTLMISRTPEVTCVVVDVSHEDPEVKFNWYVDGVEVHNAKTKPREEQYNSTYRVVSVLTVLHQDWLNGKEYKCKVSNKALGAPIEKTISKAKGQPREPQVYTLPPSRDELTKNQVSLWCLVKGFYPSDIAVEWESYGTEWSNYKTTPPVLDSDGSFFLYSKLTVTKEEWQQGFVFSCSVLHEALHSHYTQKSLSLSPGK

SEQ ID NO: 2463 - protein, 217 aa, synthetic construct
  REGION 1..217: note = Description of Artificial Sequence: Synthetic polypeptide
  REGION 1..217: note = Synthetic Construct
APELLGGPSVFLFPPKPKDTLMISRTPEVTCVVVDVSHEDPEVKFNWYVDGVEVHNAKTKPREEQYNSTYRVVSVLTVLHQDWLNGKEYKCKVSNKALPAPIEKTISKAKGQPREPQVYTLPPSRDELTKNQVSLSCAVKGFYPSDIAVEWESYGTEWSNYKTTPPVLDSDGSFFLVSKLTVTKEEWQQGFVFSCSVLHEALHSHYTQKSLSLSPGK

SEQ ID NO: 2464 - protein, 217 aa, synthetic construct
  REGION 1..217: note = Description of Artificial Sequence: Synthetic polypeptide
  REGION 1..217: note = Synthetic Construct
APEAAGGPSVFLFPPKPKDTLMISRTPEVTCVVVDVSHEDPEVKFNWYVDGVEVHNAKTKPREEQYNSTYRVVSVLTVLHQDWLNGKEYKCKVSNKALPAPIEKTISKAKGQPREPQVYTLPPSRDELTKNQVSLSCAVKGFYPSDIAVEWESYGTEWSNYKTTPPVLDSDGSFFLVSKLTVTKEEWQQGFVFSCSVLHEALHSHYTQKSLSLSPGK

SEQ ID NO: 2465 - protein, 217 aa, synthetic construct
  REGION 1..217: note = Description of Artificial Sequence: Synthetic polypeptide
  REGION 1..217: note = Synthetic Construct
APEAAGGPSVFLFPPKPKDTLMISRTPEVTCVVVDVSHEDPEVKFNWYVDGVEVHNAKTKPREEQYNSTYRVVSVLTVLHQDWLNGKEYKCKVSNKALGAPIEKTISKAKGQPREPQVYTLPPSRDELTKNQVSLSCAVKGFYPSDIAVEWESYGTEWSNYKTTPPVLDSDGSFFLVSKLTVTKEEWQQGFVFSCSVLHEALHSHYTQKSLSLSPGK

SEQ ID NO: 2466 - protein, 217 aa, synthetic construct
  REGION 1..217: note = Description of Artificial Sequence: Synthetic polypeptide
  REGION 1..217: note = Synthetic Construct
APELLGGPSVFLFPPKPKDTLMISRTPEVTCVVVDVSHEDPEVKFNWYVDGVEVHNAKTKPREEQYNSTYRVVSVLTVLHQDWLNGKEYKCKVSNKALPAPIEKTISKAKGQPREPQVYTLPPSRDELTKNQVSLTCLVKGFYPSDIAVEWESFGTEWSNYKTTPPVLDSDGSFFLYSKLTVSKEEWQQGFVFSCSVLHEALHSHYTQKSLSLSPGK

SEQ ID NO: 2467 - protein, 217 aa, synthetic construct
  REGION 1..217: note = Description of Artificial Sequence: Synthetic polypeptide
  REGION 1..217: note = Synthetic Construct
APELLGGPSVFLFPPKPKDTLMISRTPEVTCVVVDVSHEDPEVKFNWYVDGVEVHNAKTKPREEQYNSTYRVVSVLTVLHQDWLNGKEYKCKVSNKALPAPIEKTISKAKGQPREPQVYTLPPSRDELTKNQVSLWCLVKGFYPSDIAVEWESFGTEWSNYKTTPPVLDSDGSFFLYSKLTVSKEEWQQGFVFSCSVLHEALHSHYTQKSLSLSPGK

SEQ ID NO: 2468 - protein, 217 aa, synthetic construct
  REGION 1..217: note = Description of Artificial Sequence: Synthetic polypeptide
  REGION 1..217: note = Synthetic Construct
APEAAGGPSVFLFPPKPKDTLMISRTPEVTCVVVDVSHEDPEVKFNWYVDGVEVHNAKTKPREEQYNSTYRVVSVLTVLHQDWLNGKEYKCKVSNKALPAPIEKTISKAKGQPREPQVYTLPPSRDELTKNQVSLWCLVKGFYPSDIAVEWESFGTEWSNYKTTPPVLDSDGSFFLYSKLTVSKEEWQQGFVFSCSVLHEALHSHYTQKSLSLSPGK

SEQ ID NO: 2469 - protein, 217 aa, synthetic construct
  REGION 1..217: note = Description of Artificial Sequence: Synthetic polypeptide
  REGION 1..217: note = Synthetic Construct
APEAAGGPSVFLFPPKPKDTLMISRTPEVTCVVVDVSHEDPEVKFNWYVDGVEVHNAKTKPREEQYNSTYRVVSVLTVLHQDWLNGKEYKCKVSNKALGAPIEKTISKAKGQPREPQVYTLPPSRDELTKNQVSLWCLVKGFYPSDIAVEWESFGTEWSNYKTTPPVLDSDGSFFLYSKLTVSKEEWQQGFVFSCSVLHEALHSHYTQKSLSLSPGK

SEQ ID NO: 2470 - protein, 217 aa, synthetic construct
  REGION 1..217: note = Description of Artificial Sequence: Synthetic polypeptide
  REGION 1..217: note = Synthetic Construct
APELLGGPSVFLFPPKPKDTLMISRTPEVTCVVVDVSHEDPEVKFNWYVDGVEVHNAKTKPREEQYNSTYRVVSVLTVLHQDWLNGKEYKCKVSNKALPAPIEKTISKAKGQPREPQVYTLPPSRDELTKNQVSLSCAVKGFYPSDIAVEWESFGTEWSNYKTTPPVLDSDGSFFLVSKLTVSKEEWQQGFVFSCSVLHEALHSHYTQKSLSLSPGK

SEQ ID NO: 2471 - protein, 217 aa, synthetic construct
  REGION 1..217: note = Description of Artificial Sequence: Synthetic polypeptide
  REGION 1..217: note = Synthetic Construct
APEAAGGPSVFLFPPKPKDTLMISRTPEVTCVVVDVSHEDPEVKFNWYVDGVEVHNAKTKPREEQYNSTYRVVSVLTVLHQDWLNGKEYKCKVSNKALPAPIEKTISKAKGQPREPQVYTLPPSRDELTKNQVSLSCAVKGFYPSDIAVEWESFGTEWSNYKTTPPVLDSDGSFFLVSKLTVSKEEWQQGFVFSCSVLHEALHSHYTQKSLSLSPGK

SEQ ID NO: 2472 - protein, 217 aa, synthetic construct
  REGION 1..217: note = Description of Artificial Sequence: Synthetic polypeptide
  REGION 1..217: note = Synthetic Construct
APEAAGGPSVFLFPPKPKDTLMISRTPEVTCVVVDVSHEDPEVKFNWYVDGVEVHNAKTKPREEQYNSTYRVVSVLTVLHQDWLNGKEYKCKVSNKALGAPIEKTISKAKGQPREPQVYTLPPSRDELTKNQVSLSCAVKGFYPSDIAVEWESFGTEWSNYKTTPPVLDSDGSFFLVSKLTVSKEEWQQGFVFSCSVLHEALHSHYTQKSLSLSPGK

SEQ ID NO: 2473 - protein, 217 aa, synthetic construct
  REGION 1..217: note = Description of Artificial Sequence: Synthetic polypeptide
  REGION 1..217: note = Synthetic Construct
APELLGGPSVFLFPPKPKDTLMISRTPEVTCVVVDVSHEDPEVKFNWYVDGVEVHNAKTKPREEQYNSTYRVVSVLTVLHQDWLNGKEYKCKVSNKALPAPIEKTISKAKGQPREPQVYTLPPSRDELTKNQVSLTCLVKGFYPSDIAVEWESYGTEWANYKTTPPVLDSDGSFFLYSKLTVTKEEWQQGFVFSCSVLHEALHSHYTQKSLSLSPGK

SEQ ID NO: 2474 - protein, 217 aa, synthetic construct
  REGION 1..217: note = Description of Artificial Sequence: Synthetic polypeptide
  REGION 1..217: note = Synthetic Construct
APELLGGPSVFLFPPKPKDTLMISRTPEVTCVVVDVSHEDPEVKFNWYVDGVEVHNAKTKPREEQYNSTYRVVSVLTVLHQDWLNGKEYKCKVSNKALPAPIEKTISKAKGQPREPQVYTLPPSRDELTKNQVSLWCLVKGFYPSDIAVEWESYGTEWANYKTTPPVLDSDGSFFLYSKLTVTKEEWQQGFVFSCSVLHEALHSHYTQKSLSLSPGK

SEQ ID NO: 2475 - protein, 217 aa, synthetic construct
  REGION 1..217: note = Description of Artificial Sequence: Synthetic polypeptide
  REGION 1..217: note = Synthetic Construct
APEAAGGPSVFLFPPKPKDTLMISRTPEVTCVVVDVSHEDPEVKFNWYVDGVEVHNAKTKPREEQYNSTYRVVSVLTVLHQDWLNGKEYKCKVSNKALPAPIEKTISKAKGQPREPQVYTLPPSRDELTKNQVSLWCLVKGFYPSDIAVEWESYGTEWANYKTTPPVLDSDGSFFLYSKLTVTKEEWQQGFVFSCSVLHEALHSHYTQKSLSLSPGK

SEQ ID NO: 2476 - protein, 217 aa, synthetic construct
  REGION 1..217: note = Description of Artificial Sequence: Synthetic polypeptide
  REGION 1..217: note = Synthetic Construct
APEAAGGPSVFLFPPKPKDTLMISRTPEVTCVVVDVSHEDPEVKFNWYVDGVEVHNAKTKPREEQYNSTYRVVSVLTVLHQDWLNGKEYKCKVSNKALGAPIEKTISKAKGQPREPQVYTLPPSRDELTKNQVSLWCLVKGFYPSDIAVEWESYGTEWANYKTTPPVLDSDGSFFLYSKLTVTKEEWQQGFVFSCSVLHEALHSHYTQKSLSLSPGK

SEQ ID NO: 2477 - protein, 217 aa, synthetic construct
  REGION 1..217: note = Description of Artificial Sequence: Synthetic polypeptide
  REGION 1..217: note = Synthetic Construct
APELLGGPSVFLFPPKPKDTLMISRTPEVTCVVVDVSHEDPEVKFNWYVDGVEVHNAKTKPREEQYNSTYRVVSVLTVLHQDWLNGKEYKCKVSNKALPAPIEKTISKAKGQPREPQVYTLPPSRDELTKNQVSLSCAVKGFYPSDIAVEWESYGTEWANYKTTPPVLDSDGSFFLVSKLTVTKEEWQQGFVFSCSVLHEALHSHYTQKSLSLSPGK

SEQ ID NO: 2478 - protein, 217 aa, synthetic construct
  REGION 1..217: note = Description of Artificial Sequence: Synthetic polypeptide
  REGION 1..217: note = Synthetic Construct
APEAAGGPSVFLFPPKPKDTLMISRTPEVTCVVVDVSHEDPEVKFNWYVDGVEVHNAKTKPREEQYNSTYRVVSVLTVLHQDWLNGKEYKCKVSNKALPAPIEKTISKAKGQPREPQVYTLPPSRDELTKNQVSLSCAVKGFYPSDIAVEWESYGTEWANYKTTPPVLDSDGSFFLVSKLTVTKEEWQQGFVFSCSVLHEALHSHYTQKSLSLSPGK

SEQ ID NO: 2479 - protein, 217 aa, synthetic construct
  REGION 1..217: note = Description of Artificial Sequence: Synthetic polypeptide
  REGION 1..217: note = Synthetic Construct
APEAAGGPSVFLFPPKPKDTLMISRTPEVTCVVVDVSHEDPEVKFNWYVDGVEVHNAKTKPREEQYNSTYRVVSVLTVLHQDWLNGKEYKCKVSNKALGAPIEKTISKAKGQPREPQVYTLPPSRDELTKNQVSLSCAVKGFYPSDIAVEWESYGTEWANYKTTPPVLDSDGSFFLVSKLTVTKEEWQQGFVFSCSVLHEALHSHYTQKSLSLSPGK

SEQ ID NO: 2480 - protein, 217 aa, synthetic construct
  REGION 1..217: note = Description of Artificial Sequence: Synthetic polypeptide
  REGION 1..217: note = Synthetic Construct
APELLGGPSVFLFPPKPKDTLMISRTPEVTCVVVDVSHEDPEVKFNWYVDGVEVHNAKTKPREEQYNSTYRVVSVLTVLHQDWLNGKEYKCKVSNKALPAPIEKTISKAKGQPREPQVYTLPPSRDELTKNQVSLTCLVKGFYPSDIAVEWESYGTEWANYKTTPPVLDSDGSFFLYSKLTVSKSEWQQGFVFSCSVLHEALHSHYTQKSLSLSPGK

SEQ ID NO: 2481 - protein, 217 aa, synthetic construct
  REGION 1..217: note = Description of Artificial Sequence: Synthetic polypeptide
  REGION 1..217: note = Synthetic Construct
APELLGGPSVFLFPPKPKDTLMISRTPEVTCVVVDVSHEDPEVKFNWYVDGVEVHNAKTKPREEQYNSTYRVVSVLTVLHQDWLNGKEYKCKVSNKALPAPIEKTISKAKGQPREPQVYTLPPSRDELTKNQVSLWCLVKGFYPSDIAVEWESYGTEWANYKTTPPVLDSDGSFFLYSKLTVSKSEWQQGFVFSCSVLHEALHSHYTQKSLSLSPGK

SEQ ID NO: 2482 - protein, 217 aa, synthetic construct
  REGION 1..217: note = Description of Artificial Sequence: Synthetic polypeptide
  REGION 1..217: note = Synthetic Construct
APEAAGGPSVFLFPPKPKDTLMISRTPEVTCVVVDVSHEDPEVKFNWYVDGVEVHNAKTKPREEQYNSTYRVVSVLTVLHQDWLNGKEYKCKVSNKALPAPIEKTISKAKGQPREPQVYTLPPSRDELTKNQVSLWCLVKGFYPSDIAVEWESYGTEWANYKTTPPVLDSDGSFFLYSKLTVSKSEWQQGFVFSCSVLHEALHSHYTQKSLSLSPGK

SEQ ID NO: 2483 - protein, 217 aa, synthetic construct
  REGION 1..217: note = Description of Artificial Sequence: Synthetic polypeptide
  REGION 1..217: note = Synthetic Construct
APEAAGGPSVFLFPPKPKDTLMISRTPEVTCVVVDVSHEDPEVKFNWYVDGVEVHNAKTKPREEQYNSTYRVVSVLTVLHQDWLNGKEYKCKVSNKALGAPIEKTISKAKGQPREPQVYTLPPSRDELTKNQVSLWCLVKGFYPSDIAVEWESYGTEWANYKTTPPVLDSDGSFFLYSKLTVSKSEWQQGFVFSCSVLHEALHSHYTQKSLSLSPGK

SEQ ID NO: 2484 - protein, 217 aa, synthetic construct
  REGION 1..217: note = Description of Artificial Sequence: Synthetic polypeptide
  REGION 1..217: note = Synthetic Construct
APELLGGPSVFLFPPKPKDTLMISRTPEVTCVVVDVSHEDPEVKFNWYVDGVEVHNAKTKPREEQYNSTYRVVSVLTVLHQDWLNGKEYKCKVSNKALPAPIEKTISKAKGQPREPQVYTLPPSRDELTKNQVSLSCAVKGFYPSDIAVEWESYGTEWANYKTTPPVLDSDGSFFLVSKLTVSKSEWQQGFVFSCSVLHEALHSHYTQKSLSLSPGK

SEQ ID NO: 2485 - protein, 217 aa, synthetic construct
  REGION 1..217: note = Description of Artificial Sequence: Synthetic polypeptide
  REGION 1..217: note = Synthetic Construct
APEAAGGPSVFLFPPKPKDTLMISRTPEVTCVVVDVSHEDPEVKFNWYVDGVEVHNAKTKPREEQYNSTYRVVSVLTVLHQDWLNGKEYKCKVSNKALPAPIEKTISKAKGQPREPQVYTLPPSRDELTKNQVSLSCAVKGFYPSDIAVEWESYGTEWANYKTTPPVLDSDGSFFLVSKLTVSKSEWQQGFVFSCSVLHEALHSHYTQKSLSLSPGK

SEQ ID NO: 2486 - protein, 217 aa, synthetic construct
  REGION 1..217: note = Description of Artificial Sequence: Synthetic polypeptide
  REGION 1..217: note = Synthetic Construct
APEAAGGPSVFLFPPKPKDTLMISRTPEVTCVVVDVSHEDPEVKFNWYVDGVEVHNAKTKPREEQYNSTYRVVSVLTVLHQDWLNGKEYKCKVSNKALGAPIEKTISKAKGQPREPQVYTLPPSRDELTKNQVSLSCAVKGFYPSDIAVEWESYGTEWANYKTTPPVLDSDGSFFLVSKLTVSKSEWQQGFVFSCSVLHEALHSHYTQKSLSLSPGK

SEQ ID NO: 2487 - protein, 217 aa, synthetic construct
  REGION 1..217: note = Description of Artificial Sequence: Synthetic polypeptide
  REGION 1..217: note = Synthetic Construct
APELLGGPSVFLFPPKPKDTLMISRTPEVTCVVVDVSHEDPEVKFNWYVDGVEVHNAKTKPREEQYNSTYRVVSVLTVLHQDWLNGKEYKCKVSNKALPAPIEKTISKAKGQPREPQVYTLPPSRDELTKNQVSLTCLVKGFYPSDIAVEWESYGTEWVNYKTTPPVLDSDGSFFLYSKLTVTKEEWQQGFVFSCSVLHEALHSHYTQKSLSLSPGK

SEQ ID NO: 2488 - protein, 217 aa, synthetic construct
  REGION 1..217: note = Description of Artificial Sequence: Synthetic polypeptide
  REGION 1..217: note = Synthetic Construct
APELLGGPSVFLFPPKPKDTLMISRTPEVTCVVVDVSHEDPEVKFNWYVDGVEVHNAKTKPREEQYNSTYRVVSVLTVLHQDWLNGKEYKCKVSNKALPAPIEKTISKAKGQPREPQVYTLPPSRDELTKNQVSLWCLVKGFYPSDIAVEWESYGTEWVNYKTTPPVLDSDGSFFLYSKLTVTKEEWQQGFVFSCSVLHEALHSHYTQKSLSLSPGK

SEQ ID NO: 2489 - protein, 217 aa, synthetic construct
  REGION 1..217: note = Description of Artificial Sequence: Synthetic polypeptide
  REGION 1..217: note = Synthetic Construct
APEAAGGPSVFLFPPKPKDTLMISRTPEVTCVVVDVSHEDPEVKFNWYVDGVEVHNAKTKPREEQYNSTYRVVSVLTVLHQDWLNGKEYKCKVSNKALPAPIEKTISKAKGQPREPQVYTLPPSRDELTKNQVSLWCLVKGFYPSDIAVEWESYGTEWVNYKTTPPVLDSDGSFFLYSKLTVTKEEWQQGFVFSCSVLHEALHSHYTQKSLSLSPGK

SEQ ID NO: 2490 - protein, 217 aa, synthetic construct
  REGION 1..217: note = Description of Artificial Sequence: Synthetic polypeptide
  REGION 1..217: note = Synthetic Construct
APEAAGGPSVFLFPPKPKDTLMISRTPEVTCVVVDVSHEDPEVKFNWYVDGVEVHNAKTKPREEQYNSTYRVVSVLTVLHQDWLNGKEYKCKVSNKALGAPIEKTISKAKGQPREPQVYTLPPSRDELTKNQVSLWCLVKGFYPSDIAVEWESYGTEWVNYKTTPPVLDSDGSFFLYSKLTVTKEEWQQGFVFSCSVLHEALHSHYTQKSLSLSPGK

SEQ ID NO: 2491 - protein, 217 aa, synthetic construct
  REGION 1..217: note = Description of Artificial Sequence: Synthetic polypeptide
  REGION 1..217: note = Synthetic Construct
APELLGGPSVFLFPPKPKDTLMISRTPEVTCVVVDVSHEDPEVKFNWYVDGVEVHNAKTKPREEQYNSTYRVVSVLTVLHQDWLNGKEYKCKVSNKALPAPIEKTISKAKGQPREPQVYTLPPSRDELTKNQVSLSCAVKGFYPSDIAVEWESYGTEWVNYKTTPPVLDSDGSFFLVSKLTVTKEEWQQGFVFSCSVLHEALHSHYTQKSLSLSPGK

SEQ ID NO: 2492 - protein, 217 aa, synthetic construct
  REGION 1..217: note = Description of Artificial Sequence: Synthetic polypeptide
  REGION 1..217: note = Synthetic Construct
APEAAGGPSVFLFPPKPKDTLMISRTPEVTCVVVDVSHEDPEVKFNWYVDGVEVHNAKTKPREEQYNSTYRVVSVLTVLHQDWLNGKEYKCKVSNKALPAPIEKTISKAKGQPREPQVYTLPPSRDELTKNQVSLSCAVKGFYPSDIAVEWESYGTEWVNYKTTPPVLDSDGSFFLVSKLTVTKEEWQQGFVFSCSVLHEALHSHYTQKSLSLSPGK

SEQ ID NO: 2493 - protein, 217 aa, synthetic construct
  REGION 1..217: note = Description of Artificial Sequence: Synthetic polypeptide
  REGION 1..217: note = Synthetic Construct
APEAAGGPSVFLFPPKPKDTLMISRTPEVTCVVVDVSHEDPEVKFNWYVDGVEVHNAKTKPREEQYNSTYRVVSVLTVLHQDWLNGKEYKCKVSNKALGAPIEKTISKAKGQPREPQVYTLPPSRDELTKNQVSLSCAVKGFYPSDIAVEWESYGTEWVNYKTTPPVLDSDGSFFLVSKLTVTKEEWQQGFVFSCSVLHEALHSHYTQKSLSLSPGK

SEQ ID NO: 2494 - protein, 217 aa, synthetic construct
  REGION 1..217: note = Description of Artificial Sequence: Synthetic polypeptide
  REGION 1..217: note = Synthetic Construct
APELLGGPSVFLFPPKPKDTLMISRTPEVTCVVVDVSHEDPEVKFNWYVDGVEVHNAKTKPREEQYNSTYRVVSVLTVLHQDWLNGKEYKCKVSNKALPAPIEKTISKAKGQPREPQVYTLPPSRDELTKNQVSLTCLVKGFYPSDIAVEWESYGTEWSNYKTTPPVLDSDGSFFLYSKLTVSKEEWQQGFVFSCSVLHEALHSHYTQKSLSLSPGK

SEQ ID NO: 2495 - protein, 217 aa, synthetic construct
  REGION 1..217: note = Description of Artificial Sequence: Synthetic polypeptide
  REGION 1..217: note = Synthetic Construct
APELLGGPSVFLFPPKPKDTLMISRTPEVTCVVVDVSHEDPEVKFNWYVDGVEVHNAKTKPREEQYNSTYRVVSVLTVLHQDWLNGKEYKCKVSNKALPAPIEKTISKAKGQPREPQVYTLPPSRDELTKNQVSLWCLVKGFYPSDIAVEWESYGTEWSNYKTTPPVLDSDGSFFLYSKLTVSKEEWQQGFVFSCSVLHEALHSHYTQKSLSLSPGK

SEQ ID NO: 2496 - protein, 217 aa, synthetic construct
  REGION 1..217: note = Description of Artificial Sequence: Synthetic polypeptide
  REGION 1..217: note = Synthetic Construct
APEAAGGPSVFLFPPKPKDTLMISRTPEVTCVVVDVSHEDPEVKFNWYVDGVEVHNAKTKPREEQYNSTYRVVSVLTVLHQDWLNGKEYKCKVSNKALPAPIEKTISKAKGQPREPQVYTLPPSRDELTKNQVSLWCLVKGFYPSDIAVEWESYGTEWSNYKTTPPVLDSDGSFFLYSKLTVSKEEWQQGFVFSCSVLHEALHSHYTQKSLSLSPGK

SEQ ID NO: 2497 - protein, 217 aa, synthetic construct
  REGION 1..217: note = Description of Artificial Sequence: Synthetic polypeptide
  REGION 1..217: note = Synthetic Construct
APEAAGGPSVFLFPPKPKDTLMISRTPEVTCVVVDVSHEDPEVKFNWYVDGVEVHNAKTKPREEQYNSTYRVVSVLTVLHQDWLNGKEYKCKVSNKALGAPIEKTISKAKGQPREPQVYTLPPSRDELTKNQVSLWCLVKGFYPSDIAVEWESYGTEWSNYKTTPPVLDSDGSFFLYSKLTVSKEEWQQGFVFSCSVLHEALHSHYTQKSLSLSPGK

SEQ ID NO: 2498 - protein, 217 aa, synthetic construct
  REGION 1..217: note = Description of Artificial Sequence: Synthetic polypeptide
  REGION 1..217: note = Synthetic Construct
APELLGGPSVFLFPPKPKDTLMISRTPEVTCVVVDVSHEDPEVKFNWYVDGVEVHNAKTKPREEQYNSTYRVVSVLTVLHQDWLNGKEYKCKVSNKALPAPIEKTISKAKGQPREPQVYTLPPSRDELTKNQVSLSCAVKGFYPSDIAVEWESYGTEWSNYKTTPPVLDSDGSFFLVSKLTVSKEEWQQGFVFSCSVLHEALHSHYTQKSLSLSPGK

SEQ ID NO: 2499 - protein, 217 aa, synthetic construct
  REGION 1..217: note = Description of Artificial Sequence: Synthetic polypeptide
  REGION 1..217: note = Synthetic Construct
APEAAGGPSVFLFPPKPKDTLMISRTPEVTCVVVDVSHEDPEVKFNWYVDGVEVHNAKTKPREEQYNSTYRVVSVLTVLHQDWLNGKEYKCKVSNKALPAPIEKTISKAKGQPREPQVYTLPPSRDELTKNQVSLSCAVKGFYPSDIAVEWESYGTEWSNYKTTPPVLDSDGSFFLVSKLTVSKEEWQQGFVFSCSVLHEALHSHYTQKSLSLSPGK

SEQ ID NO: 2500 - protein, 217 aa, synthetic construct
  REGION 1..217: note = Description of Artificial Sequence: Synthetic polypeptide
  REGION 1..217: note = Synthetic Construct
APEAAGGPSVFLFPPKPKDTLMISRTPEVTCVVVDVSHEDPEVKFNWYVDGVEVHNAKTKPREEQYNSTYRVVSVLTVLHQDWLNGKEYKCKVSNKALGAPIEKTISKAKGQPREPQVYTLPPSRDELTKNQVSLSCAVKGFYPSDIAVEWESYGTEWSNYKTTPPVLDSDGSFFLVSKLTVSKEEWQQGFVFSCSVLHEALHSHYTQKSLSLSPGK

SEQ ID NO: 2501 - protein, 217 aa, synthetic construct
  REGION 1..217: note = Description of Artificial Sequence: Synthetic polypeptide
  REGION 1..217: note = Synthetic Construct
APELLGGPSVFLFPPKPKDTLMISRTPEVTCVVVDVSHEDPEVKFNWYVDGVEVHNAKTKPREEQYNSTYRVVSVLTVLHQDWLNGKEYKCKVSNKALPAPIEKTISKAKGQPREPQVYTLPPSRDELTKNQVSLSCAVKGFYPSDIAVEWESNGQPENNYKTTPPVLDSDGSFFLVSKLTVDKSRWQQGNVFSCSVLHEALHSHYTQKSLSLSPGK

SEQ ID NO: 2502 - protein, 217 aa, synthetic construct
  REGION 1..217: note = Description of Artificial Sequence: Synthetic polypeptide
  REGION 1..217: note = Synthetic Construct
APEAAGGPSVFLFPPKPKDTLMISRTPEVTCVVVDVSHEDPEVKFNWYVDGVEVHNAKTKPREEQYNSTYRVVSVLTVLHQDWLNGKEYKCKVSNKALPAPIEKTISKAKGQPREPQVYTLPPSRDELTKNQVSLSCAVKGFYPSDIAVEWESNGQPENNYKTTPPVLDSDGSFFLVSKLTVDKSRWQQGNVFSCSVLHEALHSHYTQKSLSLSPGK

SEQ ID NO: 2503 - protein, 217 aa, synthetic construct
  REGION 1..217: note = Description of Artificial Sequence: Synthetic polypeptide
  REGION 1..217: note = Synthetic Construct
APELLGGPSVFLFPPKPKDTLMISRTPEVTCVVVDVSHEDPEVKFNWYVDGVEVHNAKTKPREEQYNSTYRVVSVLTVLHQDWLNGKEYKCKVSNKALPAPIEKTISKAKGQPREPQVYTLPPSRDELTKNQVSLWCLVKGFYPSDIAVEWESNGQPENNYKTTPPVLDSDGSFFLYSKLTVDKSRWQQGNVFSCSVLHEALHSHYTQKSLSLSPGK

SEQ ID NO: 2504 - protein, 217 aa, synthetic construct
  REGION 1..217: note = Description of Artificial Sequence: Synthetic polypeptide
  REGION 1..217: note = Synthetic Construct
APEAAGGPSVFLFPPKPKDTLMISRTPEVTCVVVDVSHEDPEVKFNWYVDGVEVHNAKTKPREEQYNSTYRVVSVLTVLHQDWLNGKEYKCKVSNKALPAPIEKTISKAKGQPREPQVYTLPPSRDELTKNQVSLWCLVKGFYPSDIAVEWESNGQPENNYKTTPPVLDSDGSFFLYSKLTVDKSRWQQGNVFSCSVLHEALHSHYTQKSLSLSPGK

SEQ ID NO: 2505 - protein, 193 aa, synthetic construct
  REGION 1..193: note = Description of Artificial Sequence: Synthetic polypeptide
  REGION 1..193: note = Synthetic Construct
MPALLSLVSLLSVLLMGCVAETGGSGHHHHHHSGTHNTTVFQGVAGQSLQVSCPYDSMKHWGRRKAWCRQLGEKGPCQRVVSTHNLWLLSFLRRWNGSTAITDDTLGGTLTITLRNLQPHDAGLYQCQSLHGSEADTLRKVLVEVLADPLDHRDAGDLWFPGESESFEDAHVEHSISRSLLEGEIPFPPTSAS

SEQ ID NO: 2506 - protein, 119 aa, synthetic construct
  REGION 1..119: note = Description of Artificial Sequence: Synthetic polypeptide
EVQLLESGGGLVQPGGSLRLSCAASGFTFSNYYMAWVRQAPGKGLEWVSSLTNSGGSTYYADSVKGRFTISRDNSKNTLYLQMNSLRAEDTAVYYCTREWAGSGYFDYWGQGTLVTVSS

SEQ ID NO: 2507 - protein, 107 aa, synthetic construct
  REGION 1..107: note = Description of Artificial Sequence: Synthetic polypeptide
DIQMTQSPSSLSASVGDRVTITCKASQNVGNNLAWYQQKPGKAPKLLIYYTSNRFTGVPSRFSGSGSGTDFTLTISSLQPEDFATYYCQRIYNSPWTFGQGTKLEIK

SEQ ID NO: 2508 - protein, 119 aa, synthetic construct; identical to SEQ ID NO: 2506
  REGION 1..119: note = Description of Artificial Sequence: Synthetic polypeptide

SEQ ID NO: 2509 - protein, 107 aa, synthetic construct
  REGION 1..107: note = Description of Artificial Sequence: Synthetic polypeptide
DIQMTQSPSSLSASVGDRVTMTCKASQNVGNNLAWYQQKPGKAPKLLLYYTSNRFTGVPSRFSGSGSGTDFTLTISSVQPEDFATYYCQRIYNSPWTFGQGTKLELK

SEQ ID NO: 2510 - protein, 119 aa, synthetic construct
  REGION 1..119: note = Description of Artificial Sequence: Synthetic polypeptide
EVQLLESGGGLVQPGGSLRLSCAASGFTFSNYYMAWVRQAPGKGLEWVASLTNSGGSTYYADSVKGRFTLSRDNSKNTLYLQMNSLRAEDTAVYYCTREWAGSGYFDYWGQGTLVTVSS

SEQ ID NO: 2511 - protein, 107 aa, synthetic construct; identical to SEQ ID NO: 2507
  REGION 1..107: note = Description of Artificial Sequence: Synthetic polypeptide

SEQ ID NO: 2512 - protein, 119 aa, synthetic construct
  REGION 1..119: note = Description of Artificial Sequence: Synthetic polypeptide
EVQLLESGGGLVQPGGSLRLSCAASGFTFSNYYMAWVRQAPGKGLEWVSSLTNSGGSTYYADSVKGRFTISRDNSKNTLYLQMNSLRAEDTAVYYCAKEWAGSGYFDYWGQGTLVTVSS

SEQ ID NO: 2513 - protein, 107 aa, synthetic construct; identical to SEQ ID NO: 2507
  REGION 1..107: note = Description of Artificial Sequence: Synthetic polypeptide

SEQ ID NO: 2514 - protein, 7 aa, synthetic construct
  REGION 1..7: note = Description of Artificial Sequence: Synthetic peptide
FSNYYMA

SEQ ID NO: 2515 - protein, 10 aa, synthetic construct
  REGION 1..10: note = Description of Artificial Sequence: Synthetic peptide
SLTNSGGSTY

SEQ ID NO: 2516 - protein, 7 aa, synthetic construct
  REGION 1..7: note = Description of Artificial Sequence: Synthetic peptide
EWAGSGY

SEQ ID NO: 2517 - protein, 7 aa, synthetic construct
  REGION 1..7: note = Description of Artificial Sequence: Synthetic peptide
NVGNNLA

SEQ ID NO: 2518 - protein, 7 aa, synthetic construct
  REGION 1..7: note = Description of Artificial Sequence: Synthetic peptide
YTSNRFT

SEQ ID NO: 2519 - protein, 7 aa, synthetic construct
  REGION 1..7: note = Description of Artificial Sequence: Synthetic peptide
RIYNSPW

SEQ ID NO: 2520 - DNA, 693 bp, Homo sapiens
  source 1..693: mol_type = genomic DNA
atggagcctctccggctgctcatcttactctttgtcacagagctgtccggagcccacaacaccacagtgttccagggcgtggcgggccagtccctgcaggtgtcttgcccctatgactccatgaagcactgggggaggcgcaaggcctggtgccgccagctgggagagaagggcccatgccagcgtgtggtcagcacgcacaacttgtggctgctgtccttcctgaggaggtggaatgggagcacagccatcacagacgataccctgggtggcactctcaccattacgctgcggaatctacaaccccatgatgcgggtctctaccagtgccagagcctccatggcagtgaggctgacaccctcaggaaggtcctggtggaggtgctggcagaccccctggatcaccgggatgctggagatctctggttccccggggagtctgagagcttcgaggatgcccatgtggagcacagcatctccaggagcctcttggaaggagaaatccccttcccacccacttccatccttctcctcctggcctgcatctttctcatcaagattctagcagccagcgccctctgggctgcagcctggcatggacagaagccagggacacatccacccagtgaactggactgtggccatgacccagggtatcagctccaaactctgccagggctgagagacacgtga

SEQ ID NO: 2521 - protein, 227 aa, Mus musculus; identical to SEQ ID NO: 822

SEQ ID NO: 2522 - protein, 119 aa, synthetic construct; identical to SEQ ID NO: 2512
  REGION 1..119: note = Description of Artificial Sequence: Synthetic polypeptide

SEQ ID NO: 2523 - protein, 119 aa, synthetic construct; identical to SEQ ID NO: 2506
  REGION 1..119: note = Description of Artificial Sequence: Synthetic polypeptide

SEQ ID NO: 2524 - protein, 119 aa, synthetic construct; identical to SEQ ID NO: 2510
  REGION 1..119: note = Description of Artificial Sequence: Synthetic polypeptide

SEQ ID NO: 2525 - protein, 109 aa, synthetic construct
  REGION 1..109: note = Description of Artificial Sequence: Synthetic polypeptide
EVQLLESGGGLVQPGGSLRLSCAASGFTFSSYAMSWVRQAPGKGLEWVSAISGSGGSTYYADSVKGRFTISRDNSKNTLYLQMNSLRAEDTAVYYCAKWGQGTLVTVSS

SEQ ID NO: 2526 - protein, 107 aa, synthetic construct; identical to SEQ ID NO: 2507
  REGION 1..107: note = Description of Artificial Sequence: Synthetic polypeptide

SEQ ID NO: 2527 - protein, 107 aa, synthetic construct; identical to SEQ ID NO: 2509
  REGION 1..107: note = Description of Artificial Sequence: Synthetic polypeptide

SEQ ID NO: 2528 - protein, 106 aa, synthetic construct
  REGION 1..106: note = Description of Artificial Sequence: Synthetic polypeptide
DIQMTQSPSSLSASVGDRVTITCRASQSISSYLNWYQQKPGKAPKLLIYAASSLQSGVPSRFSGSGSGTDFTLTISSLQPEDFATYYCQQSYSTPPFGQGTKLEIK

SEQ ID NO: 2529 - protein, 449 aa, synthetic construct
  REGION 1..449: note = Description of Artificial Sequence: Synthetic polypeptide
EVQLLESGGGLVQPGGSLRLSCAASGFTFSNYYMAWVRQAPGKGLEWVSSLTNSGGSTYYADSVKGRFTISRDNSKNTLYLQMNSLRAEDTAVYYCTREWAGSGYFDYWGQGTLVTVSSASTKGPSVFPLAPSSKSTSGGTAALGCLVKDYFPEPVTVSWNSGALTSGVHTFPAVLQSSGLYSLSSVVTVPSSSLGTQTYICNVNHKPSNTKVDKKVEPKSCDKTHTCPPCPAPELLGGPSVFLFPPKPKDTLMISRTPEVTCVVVDVSHEDPEVKFNWYVDGVEVHNAKTKPREEQYNSTYRVVSVLTVLHQDWLNGKEYKCKVSNKALPAPIEKTISKAKGQPREPQVYTLPPSRDELTKNQVSLTCLVKGFYPSDIAVEWESNGQPENNYKTTPPVLDSDGSFFLYSKLTVDKSRWQQGNVFSCSVMHEALHNHYTQKSLSLSPGK

SEQ ID NO: 2530 - protein, 214 aa, synthetic construct
  REGION 1..214: note = Description of Artificial Sequence: Synthetic polypeptide
DIQMTQSPSSLSASVGDRVTITCKASQNVGNNLAWYQQKPGKAPKLLIYYTSNRFTGVPSRFSGSGSGTDFTLTISSLQPEDFATYYCQRIYNSPWTFGQGTKLEIKRTVAAPSVFIFPPSDEQLKSGTASVVCLLNNFYPREAKVQWKVDNALQSGNSQESVTEQDSKDSTYSLSSTLTLSKADYEKHKVYACEVTHQGLSSPVTKSFNRGEC

SEQ ID NO: 2531 - protein, 449 aa, synthetic construct; identical to SEQ ID NO: 2529
  REGION 1..449: note = Description of Artificial Sequence: Synthetic polypeptide

SEQ ID NO: 2532 - protein, 214 aa, synthetic construct
  REGION 1..214: note = Description of Artificial Sequence: Synthetic polypeptide
DIQMTQSPSSLSASVGDRVTMTCKASQNVGNNLAWYQQKPGKAPKLLLYYTSNRFTGVPSRFSGSGSGTDFTLTISSVQPEDFATYYCQRIYNSPWTFGQGTKLELKRTVAAPSVFIFPPSDEQLKSGTASVVCLLNNFYPREAKVQWKVDNALQSGNSQESVTEQDSKDSTYSLSSTLTLSKADYEKHKVYACEVTHQGLSSPVTKSFNRGEC

SEQ ID NO: 2533 - protein, 449 aa, synthetic construct
  REGION 1..449: note = Description of Artificial Sequence: Synthetic polypeptide
EVQLLESGGGLVQPGGSLRLSCAASGFTFSNYYMAWVRQAPGKGLEWVASLTNSGGSTYYADSVKGRFTLSRDNSKNTLYLQMNSLRAEDTAVYYCTREWAGSGYFDYWGQGTLVTVSSASTKGPSVFPLAPSSKSTSGGTAALGCLVKDYFPEPVTVSWNSGALTSGVHTFPAVLQSSGLYSLSSVVTVPSSSLGTQTYICNVNHKPSNTKVDKKVEPKSCDKTHTCPPCPAPELLGGPSVFLFPPKPKDTLMISRTPEVTCVVVDVSHEDPEVKFNWYVDGVEVHNAKTKPREEQYNSTYRVVSVLTVLHQDWLNGKEYKCKVSNKALPAPIEKTISKAKGQPREPQVYTLPPSRDELTKNQVSLTCLVKGFYPSDIAVEWESNGQPENNYKTTPPVLDSDGSFFLYSKLTVDKSRWQQGNVFSCSVMHEALHNHYTQKSLSLSPGK

SEQ ID NO: 2534 - protein, 214 aa, synthetic construct; identical to SEQ ID NO: 2530
  REGION 1..214: note = Description of Artificial Sequence: Synthetic polypeptide

SEQ ID NO: 2535 - protein, 449 aa, synthetic construct
  REGION 1..449: note = Description of Artificial Sequence: Synthetic polypeptide
EVQLLESGGGLVQPGGSLRLSCAASGFTFSNYYMAWVRQAPGKGLEWVSSLTNSGGSTYYADSVKGRFTISRDNSKNTLYLQMNSLRAEDTAVYYCAKEWAGSGYFDYWGQGTLVTVSSASTKGPSVFPLAPSSKSTSGGTAALGCLVKDYFPEPVTVSWNSGALTSGVHTFPAVLQSSGLYSLSSVVTVPSSSLGTQTYICNVNHKPSNTKVDKKVEPKSCDKTHTCPPCPAPELLGGPSVFLFPPKPKDTLMISRTPEVTCVVVDVSHEDPEVKFNWYVDGVEVHNAKTKPREEQYNSTYRVVSVLTVLHQDWLNGKEYKCKVSNKALPAPIEKTISKAKGQPREPQVYTLPPSRDELTKNQVSLTCLVKGFYPSDIAVEWESNGQPENNYKTTPPVLDSDGSFFLYSKLTVDKSRWQQGNVFSCSVMHEALHNHYTQKSLSLSPGK

SEQ ID NO: 2536 - protein, 214 aa, synthetic construct; identical to SEQ ID NO: 2530
  REGION 1..214: note = Description of Artificial Sequence: Synthetic polypeptide

SEQ ID NO: 2537 - protein, 451 aa, synthetic construct
  REGION 1..451: note = Description of Artificial Sequence: Synthetic polypeptide
EVQLVESGGGLVQPGRSLKLSCAASGFTFSNYYMAWVRQAPTKGLEWVASLTNSGGSTYYRDSVKGRFTLSRDNAKSTLYLQMDSLRSEDTATYYCTREWAGSGYFDYWGQGVMVTVSSAQTTAPSVYPLAPGCGDTTSSTVTLGCLVKGYFPEPVTVTWNSGALSSDVHTFPAVLQSGLYTLTSSVTSSTWPSQTVTCNVAHPASSTKVDKKVERRDGGIGHKCPTCPTCHKCPVPELLGGPSVFLFPPKPKDILLLSQNAKVTCVVVDVSEEEPDVQFSWFVNNVEVHTAQTQPREEQYNSTFRVVSALPLQHQDWMSGKEFKCKVNNKALPSPIEKTLSKPKGLVRKPQVYVMGPPTEQLTEQTVSLTCLTSGFLPNDIGVEWTSNGHIEKNYKNTEPVMDSDGSFFMYSKLNVERSRWDSRAPFVCSVVHEGLHNHHVEKSLSRPPG

SEQ ID NO: 2538 - protein, 214 aa, synthetic construct
  REGION 1..214: note = Description of Artificial Sequence: Synthetic polypeptide
NIVMTQSPKSMSLSVGDRVTMNCKASQNVGNNLAWYQQKPGQSPKLLLYYTSNRFTGVPDRFTGGGYGTDFTLTINSVQAEDAAFYYCQRIYNSPWTFGGGTKLELKRADAAPTVSIFPPSTEQLATGGASVVCLMNNFYPRDISVKWKIDGTERRDGVLDSVTDQDSKDSTYSMSSTLSLTKADYESHNLYTCEVVHKTSSSPVVKSFNRNEC

SEQ ID NO: 2539 - protein, 112 aa, synthetic construct
  REGION 1..112: note = Description of Artificial Sequence: Synthetic polypeptide
  REGION 1..112: note = SYNTHESIZED
DVVMTQTPLSLPVSLGDQAFISCRSSQNLVHSNGNTYLHWYLQKPGQSPKLLIYIVSNRFSGVPDRFSGSGSGTDFTLEISRVEAEDLGVYFCSQSTHVPLTFGAGTKLELK

SEQ ID NO: 2540 - protein, 116 aa, synthetic construct
  REGION 1..116: note = Description of Artificial Sequence: Synthetic polypeptide
  REGION 1..116: note = SYNTHESIZED
EVQLQQSGPDLVKPGASVKMSCKASGYTFTDYNIHWVKQSHGKTLEWIGYINPNTGGTYYNQKFKGKATMTVNKSSSTAYMELRSLTSEDSAVYYCVATRWDGVNWAQGTLVTVSA

SEQ ID NO: 2541 - protein, 11 aa, synthetic construct
  REGION 1..11: note = Description of Artificial Sequence: Synthetic peptide
  REGION 1..11: note = SYNTHESIZED
QNLVHSNGNTY

SEQ ID NO: 2542 - protein, 9 aa, synthetic construct
  REGION 1..9: note = Description of Artificial Sequence: Synthetic peptide
  REGION 1..9: note = SYNTHESIZED
SQSTHVPLT

SEQ ID NO: 2543 - protein, 8 aa, synthetic construct
  REGION 1..8: note = Description of Artificial Sequence: Synthetic peptide
  REGION 1..8: note = SYNTHESIZED
GYTFTDYN

SEQ ID NO: 2544 - protein, 8 aa, synthetic construct
  REGION 1..8: note = Description of Artificial Sequence: Synthetic peptide
  REGION 1..8: note = SYNTHESIZED
INPNTGGT

SEQ ID NO: 2545 - protein, 9 aa, synthetic construct
  REGION 1..9: note = Description of Artificial Sequence: Synthetic peptide
  REGION 1..9: note = SYNTHESIZED
VATRWDGVN

SEQ ID NO: 2546 - protein, 112 aa, synthetic construct; identical to SEQ ID NO: 1636
  REGION 1..112: note = Description of Artificial Sequence: Synthetic polypeptide
  REGION 1..112: note = SYNTHESIZED

SEQ ID NO: 2547 - protein, 116 aa, synthetic construct
  REGION 1..116: note = Description of Artificial Sequence: Synthetic polypeptide
  REGION 1..116: note = SYNTHESIZED
EVQLQQSGAELVKPGASVKLSCTSSGFNIKGYYIHWVKQRTEQGLEWIGRIDPEDGETKNAPKFQGKATFGTDTFSNTAYLRLSSLTSEDTGVYYCVRTETRGAYWGPGTLVTVSA

SEQ ID NO: 2548 - protein, 11 aa, synthetic construct
  REGION 1..11: note = Description of Artificial Sequence: Synthetic peptide
  REGION 1..11: note = SYNTHESIZED
QSLVHSNGNTY

SEQ ID NO: 2549 - protein, 9 aa, synthetic construct
  REGION 1..9: note = Description of Artificial Sequence: Synthetic peptide
  REGION 1..9: note = SYNTHESIZED
SQSTHVPLT

SEQ ID NO: 2550 - protein, 8 aa, synthetic construct
  REGION 1..8: note = Description of Artificial Sequence: Synthetic peptide
  REGION 1..8: note = SYNTHESIZED
GFNIKGYY

SEQ ID NO: 2551 - protein, 8 aa, synthetic construct
  REGION 1..8: note = Description of Artificial Sequence: Synthetic peptide
  REGION 1..8: note = SYNTHESIZED
IDPEDGET

SEQ ID NO: 2552 - protein, 9 aa, synthetic construct
  REGION 1..9: note = Description of Artificial Sequence: Synthetic peptide
  REGION 1..9: note = SYNTHESIZED
VRTETRGAY

SEQ ID NO: 2553 - protein, 112 aa, synthetic construct
  REGION 1..112: note = Description of Artificial Sequence: Synthetic polypeptide
  REGION 1..112: note = SYNTHESIZED
DVVMTQTPLSLPVSLGDQASISCRSSQSLVHSNGDTYLHWYLQKRGQSPKLLIYKVSNRFSGVPDRFSGSGSGTDFTLKISRVEAEDLGVYFCSQTTHVPLTFGAGTKLELK

SEQ ID NO: 2554 - protein, 116 aa, synthetic construct
  REGION 1..116: note = Description of Artificial Sequence: Synthetic polypeptide
  REGION 1..116: note = SYNTHESIZED
QVPLQQPGAEFVKPGASVKLSCKASAYTFTRYWMHWVKQRPGRGLEWIGRIDPNSGGTNYNEKFKSKATFTVDKPSSTSYMQLSSLTSEDSAVYFCVFTGTLFDYWGQGTTLTVSS

SEQ ID NO: 2555 - protein, 11 aa, synthetic construct
  REGION 1..11: note = Description of Artificial Sequence: Synthetic peptide
  REGION 1..11: note = SYNTHESIZED
QSLVHSNGDTY

SEQ ID NO: 2556 - protein, 9 aa, synthetic construct
  REGION 1..9: note = Description of Artificial Sequence: Synthetic peptide
  REGION 1..9: note = SYNTHESIZED
SQTTHVPLT

SEQ ID NO: 2557 - protein, 8 aa, synthetic construct
  REGION 1..8: note = Description of Artificial Sequence: Synthetic peptide
  REGION 1..8: note = SYNTHESIZED
AYTFTRYW

SEQ ID NO: 2558 - protein, 8 aa, synthetic construct
  REGION 1..8: note = Description of Artificial Sequence: Synthetic peptide
  REGION 1..8: note = SYNTHESIZED
IDPNSGGT

SEQ ID NO: 2559 - protein, 9 aa, synthetic construct
  REGION 1..9: note = Description of Artificial Sequence: Synthetic peptide
  REGION 1..9: note = VFTGTLFDY
VFTGTLFDY

SEQ ID NO: 2560 - protein, 112 aa, synthetic construct
  REGION 1..112: note = Description of Artificial Sequence: Synthetic polypeptide
  REGION 1..112: note = SYNTHESIZED
DVVMTQTPLSLPVSLGDQASISCKSSQSLVHSNGNTYLHWYLQKPGQSPKLLIYKVSNRFSGVPDRFSGSGSGTDFTLKISRVEAEDLGVYFCSQSTHVPPTFGGGTKLEIK

SEQ ID NO: 2561 - protein, 120 aa, synthetic construct
  REGION 1..120: note = Description of Artificial Sequence: Synthetic polypeptide
  REGION 1..120: note = SYNTHESIZED
EVQLQHSGPVLVKPGASVKMSCKSSGYTFTDYYLNWVKQSHGKSPEWIGVINPNTGSTSYNQKFKGKATLTVDKSSSTAYMDLNSLTSEDSAVYYCATHYYGSIYKQAWFAYWGQGTLVT

SEQ ID NO: 2562 - protein, 11 aa, synthetic construct
  REGION 1..11: note = Description of Artificial Sequence: Synthetic peptide
  REGION 1..11: note = SYNTHESIZED
QSLVHSNGNTY

SEQ ID NO: 2563 - protein, 9 aa, synthetic construct
  REGION 1..9: note = Description of Artificial Sequence: Synthetic peptide
  REGION 1..9: note = SYNTHESIZED
SQSTHVPPT

SEQ ID NO: 2564 - protein, 8 aa, synthetic construct
  REGION 1..8: note = Description of Artificial Sequence: Synthetic peptide
  REGION 1..8: note = SYNTHESIZED
GYTFTDYY

SEQ ID NO: 2565 - protein, 8 aa, synthetic construct
  REGION 1..8: note = Description of Artificial Sequence: Synthetic peptide
  REGION 1..8: note = SYNTHESIZED
INPNTGST

SEQ ID NO: 2566 - protein, 16 aa, synthetic construct
  REGION 1..16: note = Description of Artificial Sequence: Synthetic peptide
  REGION 1..16: note = SYNTHESIZED
ATHYYGSIYKQAWFAY

SEQ ID NO: 2567 - protein, 112 aa, synthetic construct
  REGION 1..112: note = Description of Artificial Sequence: Synthetic polypeptide
  REGION 1..112: note = SYNTHESIZED
DVVMTQTPLSLPVSLGDQASISCKSSQSLVHSNGNTYLHWYLQKPGQSPKLLIYKVSNRFSGVPDRFSGSGSGTDFTLKISRVEAEDLGIYFCSQSTHVPPTFGGGTKLEIK

SEQ ID NO: 2568 - protein, 121 aa, synthetic construct
  REGION 1..121: note = Description of Artificial Sequence: Synthetic polypeptide
  REGION 1..121: note = SYNTHESIZED
EVQLQHSGPVLVKPGASVKMSCKASGYTFTDYYMNWVKQSHGKSPEWIGVINPNTGSTSYNQKFKGKATLTVDKSSSTAYMDLNSLTSEDSAVYYCATHYYGSIYKQAWFAYWGQGTLVTV

SEQ ID NO: 2569 - protein, 11 aa, synthetic construct
  REGION 1..11: note = Description of Artificial Sequence: Synthetic peptide
  REGION 1..11: note = SYNTHESIZED
QSLVHSNGNTY

SEQ ID NO: 2570 - protein, 9 aa, synthetic construct
  REGION 1..9: note = Description of Artificial Sequence: Synthetic peptide
  REGION 1..9: note = SYNTHESIZED
SQSTHVPPT

SEQ ID NO: 2571 - protein, 8 aa, synthetic construct
  REGION 1..8: note = Description of Artificial Sequence: Synthetic peptide
  REGION 1..8: note = SYNTHESIZED
GYTFTDYY

SEQ ID NO: 2572 - protein, 8 aa, synthetic construct
  REGION 1..8: note = Description of Artificial Sequence: Synthetic peptide
  REGION 1..8: note = SYNTHESIZED
INPNTGST

SEQ ID NO: 2573 - protein, 16 aa, synthetic construct
  REGION 1..16: note = Description of Artificial Sequence: Synthetic peptide
  REGION 1..16: note = SYNTHESIZED
ATHYYGSIYKQAWFAY

SEQ ID NO: 2574 - protein, 113 aa, synthetic construct
  REGION 1..113: note = Description of Artificial Sequence: Synthetic polypeptide
  REGION 1..113: note = SYNTHESIZED
DIVMSQSPSSLAVSVGEKVTMSCKSSQSLLYSSNLKNYLAWFQQKPGQSPKLLIYWASIRESGVPDRFTGSGSGTDFTLTINSVKAEDLAVYYCQQYYTFPLTFGAGTKLELK

SEQ ID NO: 2575 - protein, 119 aa, synthetic construct
  REGION 1..119: note = Description of Artificial Sequence: Synthetic polypeptide
  REGION 1..119: note = SYNTHESIZED
EVQLVETGGGLVQPKGSLKLSCAASGFSFNINAMHWVRQAPGTGLKWVARIRSGSNDFATYYADSVKDRFTISRDDSHSMLYLQMNNLKTEDTAIYFCVREYVNYFVHWGQGTLVTVSA

SEQ ID NO: 2576 - protein, 12 aa, synthetic construct
  REGION 1..12: note = Description of Artificial Sequence: Synthetic peptide
  REGION 1..12: note = SYNTHESIZED
QSLLYSSNLKNY

SEQ ID NO: 2577 - protein, 9 aa, synthetic construct
  REGION 1..9: note = Description of Artificial Sequence: Synthetic peptide
  REGION 1..9: note = SYNTHESIZED
QQYYTFPLT

SEQ ID NO: 2578 - protein, 8 aa, synthetic construct
  REGION 1..8: note = Description of Artificial Sequence: Synthetic peptide
  REGION 1..8: note = SYNTHESIZED
GFSFNINA

SEQ ID NO: 2579 - protein, 10 aa, synthetic construct
  REGION 1..10: note = Description of Artificial Sequence: Synthetic peptide
  REGION 1..10: note = SYNTHESIZED
IRSGSNDFAT

SEQ ID NO: 2580 - protein, 10 aa, synthetic construct
  REGION 1..10: note = Description of Artificial Sequence: Synthetic peptide
  REGION 1..10: note = SYNTHESIZED
VREYVNYFVH

SEQ ID NO: 2581 - protein, 14 aa, synthetic construct
  REGION 1..14: note = Description of Artificial Sequence: Synthetic peptide
  REGION 1..14: note = SYNTHESIZED
DHRDAGDLWFPGES

SEQ ID NO: 2582 - protein, 11 aa, synthetic construct
  REGION 1..11: note = Description of Artificial Sequence: Synthetic peptide
  REGION 1..11: note = SYNTHESIZED
  VARIANT 2: note = Ser, Thr, Asn, or Gln
  VARIANT 9: note = Asp or Asn
QXLVHSNGBTY

SEQ ID NO: 2583 - protein, 9 aa, synthetic construct
  REGION 1..9: note = Description of Artificial Sequence: Synthetic peptide
  REGION 1..9: note = SYNTHESIZED
  VARIANT 3: note = Ser, Thr, Asn, or Gln
  VARIANT 8: note = Pro or Leu
SQXTHVPXT

SEQ ID NO: 2584 - protein, 219 aa, Homo sapiens; identical to SEQ ID NO: 1926

SEQ ID NO: 2585 - protein, 222 aa, Homo sapiens; identical to SEQ ID NO: 1927

SEQ ID NO: 2586 - protein, 10 aa, synthetic construct
  REGION 1..10: note = Description of Artificial Sequence: Synthetic peptide
GYTFTGYHMS

SEQ ID NO: 2587 - protein, 17 aa, synthetic construct
  REGION 1..17: note = Description of Artificial Sequence: Synthetic peptide
VINPVSGNTVYAQKFQG

SEQ ID NO: 2588 - protein, 10 aa, synthetic construct
  REGION 1..10: note = Description of Artificial Sequence: Synthetic peptide
IPSYTYAFDY

SEQ ID NO: 2589 - protein, 5 aa, synthetic construct
  REGION 1..5: note = Description of Artificial Sequence: Synthetic peptide
GYHMS

SEQ ID NO: 2590 - protein, 7 aa, synthetic construct
  REGION 1..7: note = Description of Artificial Sequence: Synthetic peptide
GYTFTGY

SEQ ID NO: 2591 - protein, 6 aa, synthetic construct
  REGION 1..6: note = Description of Artificial Sequence: Synthetic peptide
NPVSGN

SEQ ID NO: 2592 - protein, 8 aa, synthetic construct
  REGION 1..8: note = Description of Artificial Sequence: Synthetic peptide
GYTFTGYH

SEQ ID NO: 2593 - protein, 8 aa, synthetic construct
  REGION 1..8: note = Description of Artificial Sequence: Synthetic peptide
INPVSGNT

SEQ ID NO: 2594 - protein, 12 aa, synthetic construct
  REGION 1..12: note = Description of Artificial Sequence: Synthetic peptide
ARIPSYTYAFDY

SEQ ID NO: 2595 - protein, 119 aa, synthetic construct
  REGION 1..119: note = Description of Artificial Sequence: Synthetic polypeptide
QVQLVQSGAEVKKPGASVKVSCKASGYTFTGYHMSWVRQAPGQGLEWMGVINPVSGNTVYAQKFQGRVTMTRDTSISTAYMELSRLRSEDTAVYYCARIPSYTYAFDYWGQGTLVTVSS

SEQ ID NO: 2596 - DNA, 357 bp, synthetic construct
  misc_feature 1..357: note = Description of Artificial Sequence: Synthetic polynucleotide
  source 1..357: mol_type = other DNA
caggtgcaattggtgcagagcggtgcggaagtgaaaaaaccgggtgccagcgtgaaagttagctgcaaagcgtccggatataccttcactggttaccatatgtcttgggtgcgccaggccccgggccagggcctcgagtggatgggcgttatcaacccggtttctggcaacacggtttacgcgcagaaatttcagggccgggtgaccatgacccgtgataccagcattagcaccgcgtatatggaactgagccgtctgcgtagcgaagatacggccgtgtattattgcgcgcgtatcccgtcttacacttacgctttcgattactggggccaaggcaccctggtgactgttagctca

SEQ ID NO: 2597 - protein, 449 aa, synthetic construct
  REGION 1..449: note = Description of Artificial Sequence: Synthetic polypeptide
QVQLVQSGAEVKKPGASVKVSCKASGYTFTGYHMSWVRQAPGQGLEWMGVINPVSGNTVYAQKFQGRVTMTRDTSISTAYMELSRLRSEDTAVYYCARIPSYTYAFDYWGQGTLVTVSSASTKGPSVFPLAPSSKSTSGGTAALGCLVKDYFPEPVTVSWNSGALTSGVHTFPAVLQSSGLYSLSSVVTVPSSSLGTQTYICNVNHKPSNTKVDKRVEPKSCDKTHTCPPCPAPEAAGGPSVFLFPPKPKDTLMISRTPEVTCVVVDVSHEDPEVKFNWYVDGVEVHNAKTKPREEQYNSTYRVVSVLTVLHQDWLNGKEYKCKVSNKALPAPIEKTISKAKGQPREPQVYTLPPSREEMTKNQVSLTCLVKGFYPSDIAVEWESNGQPENNYKTTPPVLDSDGSFFLYSKLTVDKSRWQQGNVFSCSVMHEALHNHYTQKSLSLSPGK

SEQ ID NO: 2598 - DNA, 1347 bp, synthetic construct
  misc_feature 1..1347: note = Description of Artificial Sequence: Synthetic polynucleotide
  source 1..1347: mol_type = other DNA
caggtgcaattggtgcagagcggtgcggaagtgaaaaaaccgggtgccagcgtgaaagttagctgcaaagcgtccggatataccttcactggttaccatatgtcttgggtgcgccaggccccgggccagggcctcgagtggatgggcgttatcaacccggtttctggcaacacggtttacgcgcagaaatttcagggccgggtgaccatgacccgtgataccagcattagcaccgcgtatatggaactgagccgtctgcgtagcgaagatacggccgtgtattattgcgcgcgtatcccgtcttacacttacgctttcgattactggggccaaggcaccctggtgactgttagctcagcctccaccaagggtccatcggtcttccccctggcaccctcctccaagagcacctctgggggcacagcggccctgggctgcctggtcaaggactacttccccgaaccggtgacggtgtcgtggaactcaggcgccctgaccagcggcgtgcacaccttcccggctgtcctacagtcctcaggactctactccctcagcagcgtggtgaccgtgccctccagcagcttgggcacccagacctacatctgcaacgtgaatcacaagcccagcaacaccaaggtggacaagagagttgagcccaaatcttgtgacaaaactcacacatgcccaccgtgcccagcacctgaagcagcggggggaccgtcagtcttcctcttccccccaaaacccaaggacaccctcatgatctcccggacccctgaggtcacatgcgtggtggtggacgtgagccacgaagaccctgaggtcaagttcaactggtacgtggacggcgtggaggtgcataatgccaagacaaagccgcgggaggagcagtacaacagcacgtaccgggtggtcagcgtcctcaccgtcctgcaccaggactggctgaatggcaaggagtacaagtgcaaggtctccaacaaagccctcccagcccccatcgagaaaaccatctccaaagccaaagggcagccccgagaaccacaggtgtacaccctgcccccatcccgggaggagatgaccaagaaccaggtcagcctgacctgcctggtcaaaggcttctatcccagcgacatcgccgtggagtgggagagcaatgggcagccggagaacaactacaagaccacgcctcccgtgctggactccgacggctccttcttcctctacagcaagctcaccgtggacaagagcaggtggcagcaggggaacgtcttctcatgctccgtgatgcatgaggctctgcacaaccactacacgcagaagagcctctccctgtctccgggtaaa

SEQ ID NO: 2599 - protein, 11 aa, synthetic construct
  REGION 1..11: note = Description of Artificial Sequence: Synthetic peptide
RASQDISNYLA

SEQ ID NO: 2600 - protein, 7 aa, synthetic construct
  REGION 1..7: note = Description of Artificial Sequence: Synthetic peptide
RASSLQS

SEQ ID NO: 2601 - protein, 10 aa, synthetic construct
  REGION 1..10: note = Description of Artificial Sequence: Synthetic peptide
FQYRHMPSQT

SEQ ID NO: 2602 - protein, 7 aa, synthetic construct
  REGION 1..7: note = Description of Artificial Sequence: Synthetic peptide
SQDISNY

SEQ ID NO: 2603 - skipped

SEQ ID NO: 2604 - protein, 7 aa, synthetic construct
  REGION 1..7: note = Description of Artificial Sequence: Synthetic peptide
YRHMPSQ

SEQ ID NO: 2605 - protein, 6 aa, synthetic construct
  REGION 1..6: note = Description of Artificial Sequence: Synthetic peptide
QDISNY

SEQ ID NO: 2606 - protein, 108 aa, synthetic construct
  REGION 1..108: note = Description of Artificial Sequence: Synthetic polypeptide
DIQMTQSPSSLSASVGDRVTITCRASQDISNYLAWYQQKPGKAPKLLIYRASSLQSGVPSRFSGSGSGTDFTLTISSLQPEDFATYYCFQYRHMPSQTFGQGTKVEIK

SEQ ID NO: 2607 - DNA, 324 bp, synthetic construct
  misc_feature 1..324: note = Description of Artificial Sequence: Synthetic polynucleotide
  source 1..324: mol_type = other DNA
gatatccagatgacccagagcccgagcagcctgagcgccagcgtgggcgatcgcgtgaccattacctgcagagccagccaggacatttctaactacctggcttggtaccagcagaaaccgggcaaagcgccgaaactattaatctaccgtgcttcttctctgcaaagcggcgtgccgagccgctttagcggcagcggatccggcaccgatttcaccctgaccattagctctctgcaaccggaagactttgcgacctattattgcttccagtaccgtcatatgccgtctcagacctttggccagggcacgaaagttgaaattaaa

SEQ ID NO: 2608 - protein, 215 aa, synthetic construct
  REGION 1..215: note = Description of Artificial Sequence: Synthetic polypeptide
DIQMTQSPSSLSASVGDRVTITCRASQDISNYLAWYQQKPGKAPKLLIYRASSLQSGVPSRFSGSGSGTDFTLTISSLQPEDFATYYCFQYRHMPSQTFGQGTKVEIKRTVAAPSVFIFPPSDEQLKSGTASVVCLLNNFYPREAKVQWKVDNALQSGNSQESVTEQDSKDSTYSLSSTLTLSKADYEKHKVYACEVTHQGLSSPVTKSFNRGEC

SEQ ID NO: 2609 - DNA, 645 bp, synthetic construct
  misc_feature 1..645: note = Description of Artificial Sequence: Synthetic polynucleotide
  source 1..645: mol_type = other DNA
gatatccagatgacccagagcccgagcagcctgagcgccagcgtgggcgatcgcgtgaccattacctgcagagccagccaggacatttctaactacctggcttggtaccagcagaaaccgggcaaagcgccgaaactattaatctaccgtgcttcttctctgcaaagcggcgtgccgagccgctttagcggcagcggatccggcaccgatttcaccctgaccattagctctctgcaaccggaagactttgcgacctattattgcttccagtaccgtcatatgccgtctcagacctttggccagggcacgaaagttgaaattaaacgtacggtggccgctcccagcgtgttcatcttcccccccagcgacgagcagctgaagagcggcaccgccagcgtggtgtgcctgctgaacaacttctacccccgggaggccaaggtgcagtggaaggtggacaacgccctgcagagcggcaacagccaggaaagcgtcaccgagcaggacagcaaggactccacctacagcctgagcagcaccctgaccctgagcaaggccgactacgagaagcacaaggtgtacgcctgcgaggtgacccaccagggcctgtccagccccgtgaccaagagcttcaaccggggcgagtgt

SEQ ID NO: 2610 - DNA, 357 bp, synthetic construct
  misc_feature 1..357: note = Description of Artificial Sequence: Synthetic polynucleotide
  source 1..357: mol_type = other DNA
caagtgcaactcgtgcagtcaggagccgaagtcaagaagcctggagcctcggtcaaggtgtcctgcaaggccagcggatacactttcactggataccacatgtcgtgggtcagacaggctcctggccaagggctggagtggatgggcgtcatcaacccggtgtcgggtaataccgtgtacgcccagaagttccagggtcgcgtgaccatgacccgggatacctccattagcaccgcgtacatggagctcagccggttgagatccgaggataccgccgtgtactactgtgcgcggatcccgtcctacacttacgccttcgactattggggccaggggactcttgtcaccgtgtcctcg

SEQ ID NO: 2611 - protein, 449 aa, synthetic construct
  REGION 1..449: note = Description of Artificial Sequence: Synthetic polypeptide
QVQLVQSGAEVKKPGASVKVSCKASGYTFTGYHMSWVRQAPGQGLEWMGVINPVSGNTVYAQKFQGRVTMTRDTSISTAYMELSRLRSEDTAVYYCARIPSYTYAFDYWGQGTLVTVSSASTKGPSVFPLAPSSKSTSGGTAALGCLVKDYFPEPVTVSWNSGALTSGVHTFPAVLQSSGLYSLSSVVTVPSSSLGTQTYICNVNHKPSNTKVDKRVEPKSCDKTHTCPPCPAPELLGGPSVFLFPPKPKDTLMISRTPEVTCVVVDVSHEDPEVKFNWYVDGVEVHNAKTKPREEQYNSTYRVVSVLTVLHQDWLNGKEYKCKVSNKALPAPIEKTISKAKGQPREPQVYTLPPSREEMTKNQVSLTCLVKGFYPSDIAVEWESNGQPENNYKTTPPVLDSDGSFFLYSKLTVDKSRWQQGNVFSCSVMHEALHNHYTQKSLSLSPGK

SEQ ID NO: 2612 - DNA, 1347 bp, synthetic construct
  misc_feature 1..1347: note = Description of Artificial Sequence: Synthetic polynucleotide
  source 1..1347: mol_type = other DNA
caagtgcaactcgtgcagtcaggagccgaagtcaagaagcctggagcctcggtcaaggtgtcctgcaaggccagcggatacactttcactggataccacatgtcgtgggtcagacaggctcctggccaagggctggagtggatgggcgtcatcaacccggtgtcgggtaataccgtgtacgcccagaagttccagggtcgcgtgaccatgacccgggatacctccattagcaccgcgtacatggagctcagccggttgagatccgaggataccgccgtgtactactgtgcgcggatcccgtcctacacttacgccttcgactattggggccaggggactcttgtcaccgtgtcctcggcctccactaagggcccaagtgtgtttcccctggcccccagcagcaagtctacttccggcggaactgctgccctgggttgcctggtgaaggactacttccccgagcccgtgacagtgtcctggaactctggggctctgacttccggcgtgcacaccttccccgccgtgctgcagagcagcggcctgtacagcctgagcagcgtggtgacagtgccctccagctctctgggaacccagacctatatctgcaacgtgaaccacaagcccagcaacaccaaggtggacaagagagtggagcccaagagctgcgacaagacccacacctgccccccctgcccagctccagaactgctgggagggccttccgtgttcctgttcccccccaagcccaaggacaccctgatgatcagcaggacccccgaggtgacctgcgtggtggtggacgtgtcccacgaggacccagaggtgaagttcaactggtacgtggacggcgtggaggtgcacaacgccaagaccaagcccagagaggagcagtacaacagcacctacagggtggtgtccgtgctgaccgtgctgcaccaggactggctgaacggcaaagaatacaagtgcaaagtctccaacaaggccctgccagccccaatcgaaaagacaatcagcaaggccaagggccagccacgggagccccaggtgtacaccctgccccccagccgggaggagatgaccaagaaccaggtgtccctgacctgtctggtgaagggcttctaccccagcgatatcgccgtggagtgggagagcaacggccagcccgagaacaactacaagaccacccccccagtgctggacagcgacggcagcttcttcctgtacagcaagctgaccgtggacaagtccaggtggcagcagggcaacgtgttcagctgcagcgtgatgcacgaggccctgcacaaccactacacccagaagtccctgagcctgagccccggcaag

SEQ ID NO: 2613 - DNA, 324 bp, synthetic construct
  misc_feature 1..324: note = Description of Artificial Sequence: Synthetic polynucleotide
  source 1..324: mol_type = other DNA
gacattcagatgacccagtccccgtcgtccctgtccgcatccgtgggcgacagagtcaccatcacttgccgggcctcacaggatatttccaactacctggcctggtatcagcagaagcctggaaaggccccgaagctgctgatctaccgggcgtcctccttgcaatcgggagtgccaagccgcttttctggttccgggagcgggactgacttcaccctgactattagcagcctgcagcccgaagatttcgctacctactactgcttccagtaccggcacatgccctcacaaaccttcggacagggcaccaaagtcgagatcaag

SEQ ID NO: 2614 - DNA, 645 bp, synthetic construct
  misc_feature 1..645: note = Description of Artificial Sequence: Synthetic polynucleotide
  source 1..645: mol_type = other DNA
gacattcagatgacccagtccccgtcgtccctgtccgcatccgtgggcgacagagtcaccatcacttgccgggcctcacaggatatttccaactacctggcctggtatcagcagaagcctggaaaggccccgaagctgctgatctaccgggcgtcctccttgcaatcgggagtgccaagccgcttttctggttccgggagcgggactgacttcaccctgactattagcagcctgcagcccgaagatttcgctacctactactgcttccagtaccggcacatgccctcacaaaccttcggacagggcaccaaagtcgagatcaagcgtacggtggccgctcccagcgtgttcatcttcccccccagcgacgagcagctgaagagcggcaccgccagcgtggtgtgcctgctgaacaacttctacccccgggaggccaaggtgcagtggaaggtggacaacgccctgcagagcggcaacagccaggagagcgtcaccgagcaggacagcaaggactccacctacagcctgagcagcaccctgaccctgagcaaggccgactacgagaagcataaggtgtacgcctgcgaggtgacccaccagggcctgtccagccccgtgaccaagagcttcaacaggggcgagtgc

SEQ ID NO: 2615 - protein, 449 aa, synthetic construct
  REGION 1..449: note = Description of Artificial Sequence: Synthetic polypeptide
QVQLVQSGAEVKKPGASVKVSCKASGYTFTGYHMSWVRQAPGQGLEWMGVINPVSGNTVYAQKFQGRVTMTRDTSISTAYMELSRLRSEDTAVYYCARIPSYTYAFDYWGQGTLVTVSSASTKGPSVFPLAPSSKSTSGGTAALGCLVKDYFPEPVTVSWNSGALTSGVHTFPAVLQSSGLYSLSSVVTVPSSSLGTQTYICNVNHKPSNTKVDKRVEPKSCDKTHTCPPCPAPELLGGPSVFLFPPKPKDTLMISRTPEVTCVVVAVSHEDPEVKFNWYVDGVEVHNAKTKPREEQYNSTYRVVSVLTVLHQDWLNGKEYKCKVSNKALAAPIEKTISKAKGQPREPQVYTLPPSREEMTKNQVSLTCLVKGFYPSDIAVEWESNGQPENNYKTTPPVLDSDGSFFLYSKLTVDKSRWQQGNVFSCSVMHEALHNHYTQKSLSLSPGK

SEQ ID NO: 2616 - DNA, 1347 bp, synthetic construct
  misc_feature 1..1347: note = Description of Artificial Sequence: Synthetic polynucleotide
  source 1..1347: mol_type = other DNA
caagtgcaactcgtgcagtcaggagccgaagtcaagaagcctggagcctcggtcaaggtgtcctgcaaggccagcggatacactttcactggataccacatgtcgtgggtcagacaggctcctggccaagggctggagtggatgggcgtcatcaacccggtgtcgggtaataccgtgtacgcccagaagttccagggtcgcgtgaccatgacccgggatacctccattagcaccgcgtacatggagctcagccggttgagatccgaggataccgccgtgtactactgtgcgcggatcccgtcctacacttacgccttcgactattggggccaggggactcttgtcaccgtgtcctcggcctccactaagggcccgtcagtgttcccccttgcgccatcctcgaagtcaacctccggaggaactgccgcactgggttgcctcgtgaaagactatttcccggaacccgtcactgtctcctggaactcaggagcgctcaccagcggagtgcatacctttcctgcggtgctgcagtccagcggcctgtactccctgagctccgtcgtgaccgtcccctcgtcgtccctgggaacccaaacctacatttgcaacgtcaatcacaagccaagcaacactaaggtggacaagagagtggagcccaagtcctgcgataagacccacacctgtcctccctgtccggcacctgaactgcttggtggaccttccgtgttcctgttcccgcccaagccaaaagacaccctgatgatctcccgcactccggaagtcacttgcgtggtcgtggccgtgtcccacgaggaccccgaggtcaagtttaattggtacgtggacggagtggaagtgcacaacgccaagaccaagccgcgggaagaacagtacaactccacctaccgcgtggtgtccgtcctgactgtgctccaccaggactggctgaacggaaaggagtacaagtgcaaagtgtccaacaaggcactggctgcccctatcgaaaagactatctccaaggccaagggccaacctagggagccccaggtgtacacgttgcctccttcccgcgaagaaatgactaagaaccaggtgtcgctgacctgtctcgtgaaagggttctacccctctgacatcgccgtggaatgggagtcaaacggacagcctgagaacaactataagaccacaccacctgtcctggactccgacggctccttcttcctgtactcaaagttgaccgtggacaagtcgcggtggcaacagggcaacgtgttctcttgctccgtgatgcacgaagccctgcacaaccactacacccaaaagtcgctcagcctctcccccggaaag

SEQ ID NO: 2617 - protein, 449 aa, synthetic construct
  REGION 1..449: note = Description of Artificial Sequence: Synthetic polypeptide
QVQLVQSGAEVKKPGASVKVSCKASGYTFTGYHMSWVRQAPGQGLEWMGVINPVSGNTVYAQKFQGRVTMTRDTSISTAYMELSRLRSEDTAVYYCARIPSYTYAFDYWGQGTLVTVSSASTKGPSVFPLAPSSKSTSGGTAALGCLVKDYFPEPVTVSWNSGALTSGVHTFPAVLQSSGLYSLSSVVTVPSSSLGTQTYICNVNHKPSNTKVDKRVEPKSCDKTHTCPPCPAPELLGGPSVFLFPPKPKDTLMISRTPEVTCVVVDVSHEDPEVKFNWYVDGVEVHNAKTKPREEQYNSTYRVVSVLTVLHQDWLNGKEYKCKVSNKALPAPIEKTISKAKGQPREPQVYTLPPSREEMTKNQVSLTCLVKGFYPSDIAVEWESNGQPENNYKTTPPVLDSDGSFFLYSKLTVDKSRWQQGNVFSCSVLHEALHSHYTQKSLSLSPGK

SEQ ID NO: 2618 - DNA, 1347 bp, synthetic construct
  misc_feature 1..1347: note = Description of Artificial Sequence: Synthetic polynucleotide
  source 1..1347: mol_type = other DNA
caagtgcaactcgtgcagtcaggagccgaagtcaagaagcctggagcctcggtcaaggtgtcctgcaaggccagcggatacactttcactggataccacatgtcgtgggtcagacaggctcctggccaagggctggagtggatgggcgtcatcaacccggtgtcgggtaataccgtgtacgcccagaagttccagggtcgcgtgaccatgacccgggatacctccattagcaccgcgtacatggagctcagccggttgagatccgaggataccgccgtgtactactgtgcgcggatcccgtcctacacttacgccttcgactattggggccaggggactcttgtcaccgtgtcctcggcctccactaagggcccgtcagtgttcccccttgcgccatcctcgaagtcaacctccggaggaactgccgcactgggttgcctcgtgaaagactatttcccggaacccgtcactgtctcctggaactcaggagcgctcaccagcggagtgcatacctttcctgcggtgctgcagtccagcggcctgtactccctgagctccgtcgtgaccgtcccctcgtcgtccctgggaacccaaacctacatttgcaacgtcaatcacaagccaagcaacactaaggtggacaagagagtggagcccaagtcctgcgataagacccacacctgtcctccctgtccggcacctgaactgcttggtggaccttccgtgttcctgttcccgcccaagccaaaagacaccctgatgatctcccgcactccggaagtcacttgcgtggtcgtggacgtgtcccacgaggaccccgaggtcaagtttaattggtacgtggacggagtggaagtgcacaacgccaagaccaagccgcgggaagaacagtacaactccacctaccgcgtggtgtccgtcctgactgtgctccaccaggactggctgaacggaaaggagtacaagtgcaaagtgtccaacaaggcactgccagcccctatcgaaaagactatctccaaggccaagggccaacctagggagccccaggtgtacacgttgcctccttcccgcgaagaaatgactaagaaccaggtgtcgctgacctgtctcgtgaaagggttctacccctctgacatcgccgtggaatgggagtcaaacggacagcctgagaacaactataagaccacaccacctgtcctggactccgacggctccttcttcctgtactcaaagttgaccgtggacaagtcgcggtggcaacagggcaacgtgttctcttgctccgtgctgcacgaagccctgcacagccactacacccaaaagtcgctcagcctctcccccggaaag

SEQ ID NO: 2619 - protein, 449 aa, synthetic construct
  REGION 1..449: note = Description of Artificial Sequence: Synthetic polypeptide
QVQLVQSGAEVKKPGASVKVSCKASGYTFTGYHMSWVRQAPGQGLEWMGVINPVSGNTVYAQKFQGRVTMTRDTSISTAYMELSRLRSEDTAVYYCARIPSYTYAFDYWGQGTLVTVSSASTKGPSVFPLAPSSKSTSGGTAALGCLVKDYFPEPVTVSWNSGALTSGVHTFPAVLQSSGLYSLSSVVTVPSSSLGTQTYICNVNHKPSNTKVDKRVEPKSCDKTHTCPPCPAPELLGGPSVFLFPPKPKDTLMISRTPEVTCVVVAVSHEDPEVKFNWYVDGVEVHNAKTKPREEQYNSTYRVVSVLTVLHQDWLNGKEYKCKVSNKALAAPIEKTISKAKGQPREPQVYTLPPSREEMTKNQVSLTCLVKGFYPSDIAVEWESNGQPENNYKTTPPVLDSDGSFFLYSKLTVDKSRWQQGNVFSCSVLHEALHSHYTQKSLSLSPGK

SEQ ID NO: 2620 - DNA, 1347 bp, synthetic construct
  misc_feature 1..1347: note = Description of Artificial Sequence: Synthetic polynucleotide
  source 1..1347: mol_type = other DNA
caagtgcaactcgtgcagtcaggagccgaagtcaagaagcctggagcctcggtcaaggtgtcctgcaaggccagcggatacactttcactggataccacatgtcgtgggtcagacaggctcctggccaagggctggagtggatgggcgtcatcaacccggtgtcgggtaataccgtgtacgcccagaagttccagggtcgcgtgaccatgacccgggatacctccattagcaccgcgtacatggagctcagccggttgagatccgaggataccgccgtgtactactgtgcgcggatcccgtcctacacttacgccttcgactattggggccaggggactcttgtcaccgtgtcctcggcctccactaagggcccgtcagtgttcccccttgcgccatcctcgaagtcaacctccggaggaactgccgcactgggttgcctcgtgaaagactatttcccggaacccgtcactgtctcctggaactcaggagcgctcaccagcggagtgcatacctttcctgcggtgctgcagtccagcggcctgtactccctgagctccgtcgtgaccgtcccctcgtcgtccctgggaacccaaacctacatttgcaacgtcaatcacaagccaagcaacactaaggtggacaagagagtggagcccaagtcctgcgataagacccacacctgtcctccctgtccggcacctgaactgcttggtggaccttccgtgttcctgttcccgcccaagccaaaagacaccctgatgatctcccgcactccggaagtcacttgcgtggtcgtggccgtgtcccacgaggaccccgaggtcaagtttaattggtacgtggacggagtggaagtgcacaacgccaagaccaagccgcgggaagaacagtacaactccacctaccgcgtggtgtccgtcctgactgtgctccaccaggactggctgaacggaaaggagtacaagtgcaaagtgtccaacaaggcactggctgcccctatcgaaaagactatctccaaggccaagggccaacctagggagccccaggtgtacacgttgcctccttcccgcgaagaaatgactaagaaccaggtgtcgctgacctgtctcgtgaaagggttctacccctctgacatcgccgtggaatgggagtcaaacggacagcctgagaacaactataagaccacaccacctgtcctggactccgacggctccttcttcctgtactcaaagttgaccgtggacaagtcgcggtggcaacagggcaacgtgttctcttgctccgtgctgcacgaagccctgcacagccactacacccaaaagtcgctcagcctctcccccggaaag

SEQ ID NO: 2621 - protein, 449 aa, synthetic construct
  REGION 1..449: note = Description of Artificial Sequence: Synthetic polypeptide
QVQLVQSGAEVKKPGASVKVSCKASGYTFTGYHMSWVRQAPGQGLEWMGVINPVSGNTVYAQKFQGRVTMTRDTSISTAYMELSRLRSEDTAVYYCARIPSYTYAFDYWGQGTLVTVSSASTKGPSVFPLAPSSKSTSGGTAALGCLVKDYFPEPVTVSWNSGALTSGVHTFPAVLQSSGLYSLSSVVTVPSSSLGTQTYICNVNHKPSNTKVDKRVEPKSCDKTHTCPPCPAPELLGGPSVFLFPPKPKDTLYITREPEVTCVVVDVSHEDPEVKFNWYVDGVEVHNAKTKPREEQYNSTYRVVSVLTVLHQDWLNGKEYKCKVSNKALPAPIEKTISKAKGQPREPQVYTLPPSREEMTKNQVSLTCLVKGFYPSDIAVEWESNGQPENNYKTTPPVLDSDGSFFLYSKLTVDKSRWQQGNVFSCSVMHEALHNHYTQKSLSLSPGK

SEQ ID NO: 2622 - DNA, 1347 bp, synthetic construct
  misc_feature 1..1347: note = Description of Artificial Sequence: Synthetic polynucleotide
  source 1..1347: mol_type = other DNA
caagtgcaactcgtgcagtcaggagccgaagtcaagaagcctggagcctcggtcaaggtgtcctgcaaggccagcggatacactttcactggataccacatgtcgtgggtcagacaggctcctggccaagggctggagtggatgggcgtcatcaacccggtgtcgggtaataccgtgtacgcccagaagttccagggtcgcgtgaccatgacccgggatacctccattagcaccgcgtacatggagctcagccggttgagatccgaggataccgccgtgtactactgtgcgcggatcccgtcctacacttacgccttcgactattggggccaggggactcttgtcaccgtgtcctcggcctccactaagggcccgtcagtgttcccccttgcgccatcctcgaagtcaacctccggaggaactgccgcactgggttgcctcgtgaaagactatttcccggaacccgtcactgtctcctggaactcaggagcgctcaccagcggagtgcatacctttcctgcggtgctgcagtccagcggcctgtactccctgagctccgtcgtgaccgtcccctcgtcgtccctgggaacccaaacctacatttgcaacgtcaatcacaagccaagcaacactaaggtggacaagagagtggagcccaagtcctgcgataagacccacacctgtcctccctgtccggcacctgaactgcttggtggaccttccgtgttcctgttcccgcccaagccaaaagacaccctgtatatcactcgcgaaccggaagtcacttgcgtggtcgtggacgtgtcccacgaggaccccgaggtcaagtttaattggtacgtggacggagtggaagtgcacaacgccaagaccaagccgcgggaagaacagtacaactccacctaccgcgtggtgtccgtcctgactgtgctccaccaggactggctgaacggaaaggagtacaagtgcaaagtgtccaacaaggcactgccagcccctatcgaaaagactatctccaaggccaagggccaacctagggagccccaggtgtacacgttgcctccttcccgcgaagaaatgactaagaaccaggtgtcgctgacctgtctcgtgaaagggttctacccctctgacatcgccgtggaatgggagtcaaacggacagcctgagaacaactataagaccacaccacctgtcctggactccgacggctccttcttcctgtactcaaagttgaccgtggacaagtcgcggtggcaacagggcaacgtgttctcttgctccgtgatgcacgaagccctgcacaaccactacacccaaaagtcgctcagcctctcccccggaaag

SEQ ID NO: 2623 - protein, 12 aa, synthetic construct
  REGION 1..12: note = Description of Artificial Sequence: Synthetic peptide
GDSVSSSSAAWN

SEQ ID NO: 2624 - protein, 18 aa, synthetic construct
  REGION 1..18: note = Description of Artificial Sequence: Synthetic peptide
HIGYRSKWYNEYAVSVKS

SEQ ID NO: 2625 - protein, 16 aa, synthetic construct
  REGION 1..16: note = Description of Artificial Sequence: Synthetic peptide
GMYGSVPYKEGYYFDI

SEQ ID NO: 2626 - protein, 7 aa, synthetic construct
  REGION 1..7: note = Description of Artificial Sequence: Synthetic peptide
SSSAAWN

SEQ ID NO: 2627 - protein, 9 aa, synthetic construct
  REGION 1..9: note = Description of Artificial Sequence: Synthetic peptide
GDSVSSSSA

SEQ ID NO: 2628 - protein, 7 aa, synthetic construct
  REGION 1..7: note = Description of Artificial Sequence: Synthetic peptide
GYRSKWY

SEQ ID NO: 2629 - protein, 10 aa, synthetic construct
  REGION 1..10: note = Description of Artificial Sequence: Synthetic peptide
GDSVSSSSAA

SEQ ID NO: 2630 - protein, 9 aa, synthetic construct
  REGION 1..9: note = Description of Artificial Sequence: Synthetic peptide
IGYRSKWYN

SEQ ID NO: 2631 - protein, 18 aa, synthetic construct
  REGION 1..18: note = Description of Artificial Sequence: Synthetic peptide
ARGMYGSVPYKEGYYFDI

SEQ ID NO: 2632 - protein, 128 aa, synthetic construct
  REGION 1..128: note = Description of Artificial Sequence: Synthetic polypeptide
QVQLQQSGPGLVKPSQTLSLTCAISGDSVSSSSAAWNWIRQSPSRGLEWLGHIGYRSKWYNEYAVSVKSRITINPDTSKNQFSLQLNSVTPEDTAVYYCARGMYGSVPYKEGYYFDIWGQGTLVTVSS

SEQ ID NO: 2633 - DNA, 384 bp, synthetic construct
  misc_feature 1..384: note = Description of Artificial Sequence: Synthetic polynucleotide
  source 1..384: mol_type = other DNA
caggtgcaattgcagcagagcggtccgggcctggtgaaaccgagccagaccctgagcctgacctgcgcgatttccggagatagcgtgagctcttcttctgctgcttggaactggattcgtcagagcccgagccgtggcctcgagtggctgggccatatcggttaccgtagcaaatggtacaacgaatatgccgtgagcgtgaaaagccgcattaccattaacccggatacttcgaaaaaccagtttagcctgcaactgaacagcgtgaccccggaagatacggccgtgtattattgcgcgcgtggtatgtacggttctgttccctacaaagaaggttactacttcgatatttggggccaaggcaccctggtgactgttagctca

SEQ ID NO: 2634 - protein, 458 aa, synthetic construct
  REGION 1..458: note = Description of Artificial Sequence: Synthetic polypeptide
QVQLQQSGPGLVKPSQTLSLTCAISGDSVSSSSAAWNWIRQSPSRGLEWLGHIGYRSKWYNEYAVSVKSRITINPDTSKNQFSLQLNSVTPEDTAVYYCARGMYGSVPYKEGYYFDIWGQGTLVTVSSASTKGPSVFPLAPSSKSTSGGTAALGCLVKDYFPEPVTVSWNSGALTSGVHTFPAVLQSSGLYSLSSVVTVPSSSLGTQTYICNVNHKPSNTKVDKRVEPKSCDKTHTCPPCPAPEAAGGPSVFLFPPKPKDTLMISRTPEVTCVVVDVSHEDPEVKFNWYVDGVEVHNAKTKPREEQYNSTYRVVSVLTVLHQDWLNGKEYKCKVSNKALPAPIEKTISKAKGQPREPQVYTLPPSREEMTKNQVSLTCLVKGFYPSDIAVEWESNGQPENNYKTTPPVLDSDGSFFLYSKLTVDKSRWQQGNVFSCSVMHEALHNHYTQKSLSLSPGK

SEQ ID NO: 2635 - DNA, 1374 bp, synthetic construct
  misc_feature 1..1374: note = Description of Artificial Sequence: Synthetic polynucleotide
  source 1..1374: mol_type = other DNA
caggtgcaattgcagcagagcggtccgggcctggtgaaaccgagccagaccctgagcctgacctgcgcgatttccggagatagcgtgagctcttcttctgctgcttggaactggattcgtcagagcccgagccgtggcctcgagtggctgggccatatcggttaccgtagcaaatggtacaacgaatatgccgtgagcgtgaaaagccgcattaccattaacccggatacttcgaaaaaccagtttagcctgcaactgaacagcgtgaccccggaagatacggccgtgtattattgcgcgcgtggtatgtacggttctgttccctacaaagaaggttactacttcgatatttggggccaaggcaccctggtgactgttagctcagcctccaccaagggtccatcggtcttccccctggcaccctcctccaagagcacctctgggggcacagcggccctgggctgcctggtcaaggactacttccccgaaccggtgacggtgtcgtggaactcaggcgccctgaccagcggcgtgcacaccttcccggctgtcctacagtcctcaggactctactccctcagcagcgtggtgaccgtgccctccagcagcttgggcacccagacctacatctgcaacgtgaatcacaagcccagcaacaccaaggtggacaagagagttgagcccaaatcttgtgacaaaactcacacatgcccaccgtgcccagcacctgaagcagcggggggaccgtcagtcttcctcttccccccaaaacccaaggacaccctcatgatctcccggacccctgaggtcacatgcgtggtggtggacgtgagccacgaagaccctgaggtcaagttcaactggtacgtggacggcgtggaggtgcataatgccaagacaaagccgcgggaggagcagtacaacagcacgtaccgggtggtcagcgtcctcaccgtcctgcaccaggactggctgaatggcaaggagtacaagtgcaaggtctccaacaaagccctcccagcccccatcgagaaaaccatctccaaagccaaagggcagccccgagaaccacaggtgtacaccctgcccccatcccgggaggagatgaccaagaaccaggtcagcctgacctgcctggtcaaaggcttctatcccagcgacatcgccgtggagtgggagagcaatgggcagccggagaacaactacaagaccacgcctcccgtgctggactccgacggctccttcttcctctacagcaagctcaccgtggacaagagcaggtggcagcaggggaacgtcttctcatgctccgtgatgcatgaggctctgcacaaccactacacgcagaagagcctctccctgtctccgggtaaa

SEQ ID NO: 2636 - protein, 11 aa, synthetic construct
  REGION 1..11: note = Description of Artificial Sequence: Synthetic peptide
RASQGISSDLN

SEQ ID NO: 2637 - protein, 7 aa, synthetic construct
  REGION 1..7: note = Description of Artificial Sequence: Synthetic peptide
AASNLQS

SEQ ID NO: 2638 - protein, 9 aa, synthetic construct
  REGION 1..9: note = Description of Artificial Sequence: Synthetic peptide
QQYTDESMT

SEQ ID NO: 2639 - protein, 7 aa, synthetic construct
  REGION 1..7: note = Description of Artificial Sequence: Synthetic peptide
SQGISSD

SEQ ID NO: 2640 - skipped

SEQ ID NO: 2641 - protein, 6 aa, synthetic construct
  REGION 1..6: note = Description of Artificial Sequence: Synthetic peptide
YTDESM

SEQ ID NO: 2642 - protein, 6 aa, synthetic construct
  REGION 1..6: note = Description of Artificial Sequence: Synthetic peptide
QGISSD

SEQ ID NO: 2643 - protein, 107 aa, synthetic construct
  REGION 1..107: note = Description of Artificial Sequence: Synthetic polypeptide
DIQMTQSPSSLSASVGDRVTITCRASQGISSDLNWYQQKPGKAPKLLIYAASNLQSGVPSRFSGSGSGTDFTLTISSLQPEDFATYYCQQYTDESMTFGQGTKVEIK

SEQ ID NO: 2644 - DNA, 321 bp, synthetic construct
  misc_feature 1..321: note = Description of Artificial Sequence: Synthetic polynucleotide
  source 1..321: mol_type = other DNA
gatatccagatgacccagagcccgagcagcctgagcgccagcgtgggcgatcgcgtgaccattacctgcagagccagccagggtatttcttctgacctgaactggtaccagcagaaaccgggcaaagcgccgaaactattaatctacgctgcttctaacctgcaaagcggcgtgccgagccgctttagcggcagcggatccggcaccgatttcaccctgaccattagctctctgcaaccggaagactttgcgacctattattgccagcagtacactgacgaatctatgacctttggccagggcacgaaagttgaaattaaa

SEQ ID NO: 2645 - protein, 214 aa, synthetic construct
  REGION 1..214: note = Description of Artificial Sequence: Synthetic polypeptide
DIQMTQSPSSLSASVGDRVTITCRASQGISSDLNWYQQKPGKAPKLLIYAASNLQSGVPSRFSGSGSGTDFTLTISSLQPEDFATYYCQQYTDESMTFGQGTKVEIKRTVAAPSVFIFPPSDEQLKSGTASVVCLLNNFYPREAKVQWKVDNALQSGNSQESVTEQDSKDSTYSLSSTLTLSKADYEKHKVYACEVTHQGLSSPVTKSFNRGEC

SEQ ID NO: 2646 - DNA, 642 bp, synthetic construct
  misc_feature 1..642: note = Description of Artificial Sequence: Synthetic polynucleotide
  source 1..642: mol_type = other DNA
gatatccagatgacccagagcccgagcagcctgagcgccagcgtgggcgatcgcgtgaccattacctgcagagccagccagggtatttcttctgacctgaactggtaccagcagaaaccgggcaaagcgccgaaactattaatctacgctgcttctaacctgcaaagcggcgtgccgagccgctttagcggcagcggatccggcaccgatttcaccctgaccattagctctctgcaaccggaagactttgcgacctattattgccagcagtacactgacgaatctatgacctttggccagggcacgaaagttgaaattaaacgtacggtggccgctcccagcgtgttcatcttcccccccagcgacgagcagctgaagagcggcaccgccagcgtggtgtgcctgctgaacaacttctacccccgggaggccaaggtgcagtggaaggtggacaacgccctgcagagcggcaacagccaggaaagcgtcaccgagcaggacagcaaggactccacctacagcctgagcagcaccctgaccctgagcaaggccgactacgagaagcacaaggtgtacgcctgcgaggtgacccaccagggcctgtccagccccgtgaccaagagcttcaaccggggcgagtgt

SEQ ID NO: 2647 - DNA, 384 bp, synthetic construct
  misc_feature 1..384: note = Description of Artificial Sequence: Synthetic polynucleotide
  source 1..384: mol_type = other DNA
caagtgcaactccagcagtcaggaccggggttggtcaagccttcgcagaccctgtccctcacttgcgccattagcggagattcggtgtcgtcgtcgtcagccgcctggaactggattagacagtccccttcccgagggctggagtggctgggccacatcggataccgcagcaagtggtacaacgaatacgccgtcagcgtgaagtcacgcatcaccatcaacccggatactagcaagaaccagttcagcctccagttgaactccgtgaccccggaggataccgccgtgtactactgtgcgcggggcatgtacggatccgtgccgtacaaggagggatactacttcgacatttggggccaggggactcttgtcaccgtgtcctcg

SEQ ID NO: 2648 - protein, 458 aa, synthetic construct
  REGION 1..458: note = Description of Artificial Sequence: Synthetic polypeptide
QVQLQQSGPGLVKPSQTLSLTCAISGDSVSSSSAAWNWIRQSPSRGLEWLGHIGYRSKWYNEYAVSVKSRITINPDTSKNQFSLQLNSVTPEDTAVYYCARGMYGSVPYKEGYYFDIWGQGTLVTVSSASTKGPSVFPLAPSSKSTSGGTAALGCLVKDYFPEPVTVSWNSGALTSGVHTFPAVLQSSGLYSLSSVVTVPSSSLGTQTYICNVNHKPSNTKVDKRVEPKSCDKTHTCPPCPAPELLGGPSVFLFPPKPKDTLMISRTPEVTCVVVDVSHEDPEVKFNWYVDGVEVHNAKTKPREEQYNSTYRVVSVLTVLHQDWLNGKEYKCKVSNKALPAPIEKTISKAKGQPREPQVYTLPPSREEMTKNQVSLTCLVKGFYPSDIAVEWESNGQPENNYKTTPPVLDSDGSFFLYSKLTVDKSRWQQGNVFSCSVMHEALHNHYTQKSLSLSPGK

SEQ ID NO: 2649 - DNA, 1374 bp, synthetic construct
  misc_feature 1..1374: note = Description of Artificial Sequence: Synthetic polynucleotide
  source 1..1374: mol_type = other DNA
caagtgcaactccagcagtcaggaccggggttggtcaagccttcgcagaccctgtccctcacttgcgccattagcggagattcggtgtcgtcgtcgtcagccgcctggaactggattagacagtccccttcccgagggctggagtggctgggccacatcggataccgcagcaagtggtacaacgaatacgccgtcagcgtgaagtcacgcatcaccatcaacccggatactagcaagaaccagttcagcctccagttgaactccgtgaccccggaggataccgccgtgtactactgtgcgcggggcatgtacggatccgtgccgtacaaggagggatactacttcgacatttggggccaggggactcttgtcaccgtgtcctcggcctccactaagggcccaagtgtgtttcccctggcccccagcagcaagtctacttccggcggaactgctgccctgggttgcctggtgaaggactacttccccgagcccgtgacagtgtcctggaactctggggctctgacttccggcgtgcacaccttccccgccgtgctgcagagcagcggcctgtacagcctgagcagcgtggtgacagtgccctccagctctctgggaacccagacctatatctgcaacgtgaaccacaagcccagcaacaccaaggtggacaagagagtggagcccaagagctgcgacaagacccacacctgccccccctgcccagctccagaactgctgggagggccttccgtgttcctgttcccccccaagcccaaggacaccctgatgatcagcaggacccccgaggtgacctgcgtggtggtggacgtgtcccacgaggacccagaggtgaagttcaactggtacgtggacggcgtggaggtgcacaacgccaagaccaagcccagagaggagcagtacaacagcacctacagggtggtgtccgtgctgaccgtgctgcaccaggactggctgaacggcaaagaatacaagtgcaaagtctccaacaaggccctgccagccccaatcgaaaagacaatcagcaaggccaagggccagccacgggagccccaggtgtacaccctgccccccagccgggaggagatgaccaagaaccaggtgtccctgacctgtctggtgaagggcttctaccccagcgatatcgccgtggagtgggagagcaacggccagcccgagaacaactacaagaccacccccccagtgctggacagcgacggcagcttcttcctgtacagcaagctgaccgtggacaagtccaggtggcagcagggcaacgtgttcagctgcagcgtgatgcacgaggccctgcacaaccactacacccagaagtccctgagcctgagccccggcaag

SEQ ID NO: 2650 - DNA, 321 bp, synthetic construct
  misc_feature 1..321: note = Description of Artificial Sequence: Synthetic polynucleotide
  source 1..321: mol_type = other DNA
gacattcagatgacccagtccccgtcgtccctgtccgcatccgtgggcgacagagtcaccatcacttgccgggcctcacagggaatttcctccgacctgaactggtatcagcagaagcctggaaaggccccgaagctgctgatctacgccgcgtccaacttgcaatcgggagtgccaagccgcttttctggttccgggagcgggactgacttcaccctgactattagcagcctgcagcccgaagatttcgctacctactactgccaacagtacacagatgaatccatgaccttcggacagggcaccaaagtcgagatcaag

SEQ ID NO: 2651 - DNA, 642 bp, synthetic construct
  misc_feature 1..642: note = Description of Artificial Sequence: Synthetic polynucleotide
  source 1..642: mol_type = other DNA
gacattcagatgacccagtccccgtcgtccctgtccgcatccgtgggcgacagagtcaccatcacttgccgggcctcacagggaatttcctccgacctgaactggtatcagcagaagcctggaaaggccccgaagctgctgatctacgccgcgtccaacttgcaatcgggagtgccaagccgcttttctggttccgggagcgggactgacttcaccctgactattagcagcctgcagcccgaagatttcgctacctactactgccaacagtacacagatgaatccatgaccttcggacagggcaccaaagtcgagatcaagcgtacggtggccgctcccagcgtgttcatcttcccccccagcgacgagcagctgaagagcggcaccgccagcgtggtgtgcctgctgaacaacttctacccccgggaggccaaggtgcagtggaaggtggacaacgccctgcagagcggcaacagccaggagagcgtcaccgagcaggacagcaaggactccacctacagcctgagcagcaccctgaccctgagcaaggccgactacgagaagcataaggtgtacgcctgcgaggtgacccaccagggcctgtccagccccgtgaccaagagcttcaacaggggcgagtgc

SEQ ID NO: 2652 - protein, 458 aa, synthetic construct
  REGION 1..458: note = Description of Artificial Sequence: Synthetic polypeptide
QVQLQQSGPGLVKPSQTLSLTCAISGDSVSSSSAAWNWIRQSPSRGLEWLGHIGYRSKWYNEYAVSVKSRITINPDTSKNQFSLQLNSVTPEDTAVYYCARGMYGSVPYKEGYYFDIWGQGTLVTVSSASTKGPSVFPLAPSSKSTSGGTAALGCLVKDYFPEPVTVSWNSGALTSGVHTFPAVLQSSGLYSLSSVVTVPSSSLGTQTYICNVNHKPSNTKVDKRVEPKSCDKTHTCPPCPAPELLGGPSVFLFPPKPKDTLMISRTPEVTCVVVAVSHEDPEVKFNWYVDGVEVHNAKTKPREEQYNSTYRVVSVLTVLHQDWLNGKEYKCKVSNKALAAPIEKTISKAKGQPREPQVYTLPPSREEMTKNQVSLTCLVKGFYPSDIAVEWESNGQPENNYKTTPPVLDSDGSFFLYSKLTVDKSRWQQGNVFSCSVMHEALHNHYTQKSLSLSPGK

SEQ ID NO: 2653 - DNA, 1374 bp, synthetic construct
  misc_feature 1..1374: note = Description of Artificial Sequence: Synthetic polynucleotide
  source 1..1374: mol_type = other DNA
caagtgcaactccagcagtcaggaccggggttggtcaagccttcgcagaccctgtccctcacttgcgccattagcggagattcggtgtcgtcgtcgtcagccgcctggaactggattagacagtccccttcccgagggctggagtggctgggccacatcggataccgcagcaagtggtacaacgaatacgccgtcagcgtgaagtcacgcatcaccatcaacccggatactagcaagaaccagttcagcctccagttgaactccgtgaccccggaggataccgccgtgtactactgtgcgcggggcatgtacggatccgtgccgtacaaggagggatactacttcgacatttggggccaggggactcttgtcaccgtgtcctcggcctccactaagggcccgtcagtgttcccccttgcgccatcctcgaagtcaacctccggaggaactgccgcactgggttgcctcgtgaaagactatttcccggaacccgtcactgtctcctggaactcaggagcgctcaccagcggagtgcatacctttcctgcggtgctgcagtccagcggcctgtactccctgagctccgtcgtgaccgtcccctcgtcgtccctgggaacccaaacctacatttgcaacgtcaatcacaagccaagcaacactaaggtggacaagagagtggagcccaagtcctgcgataagacccacacctgtcctccctgtccggcacctgaactgcttggtggaccttccgtgttcctgttcccgcccaagccaaaagacaccctgatgatctcccgcactccggaagtcacttgcgtggtcgtggccgtgtcccacgaggaccccgaggtcaagtttaattggtacgtggacggagtggaagtgcacaacgccaagaccaagccgcgggaagaacagtacaactccacctaccgcgtggtgtccgtcctgactgtgctccaccaggactggctgaacggaaaggagtacaagtgcaaagtgtccaacaaggcactggctgcccctatcgaaaagactatctccaaggccaagggccaacctagggagccccaggtgtacacgttgcctccttcccgcgaagaaatgactaagaaccaggtgtcgctgacctgtctcgtgaaagggttctacccctctgacatcgccgtggaatgggagtcaaacggacagcctgagaacaactataagaccacaccacctgtcctggactccgacggctccttcttcctgtactcaaagttgaccgtggacaagtcgcggtggcaacagggcaacgtgttctcttgctccgtgatgcacgaagccctgcacaaccactacacccaaaagtcgctcagcctctcccccggaaag

SEQ ID NO: 2654 - protein, 458 aa, synthetic construct
  REGION 1..458: note = Description of Artificial Sequence: Synthetic polypeptide
QVQLQQSGPGLVKPSQTLSLTCAISGDSVSSSSAAWNWIRQSPSRGLEWLGHIGYRSKWYNEYAVSVKSRITINPDTSKNQFSLQLNSVTPEDTAVYYCARGMYGSVPYKEGYYFDIWGQGTLVTVSSASTKGPSVFPLAPSSKSTSGGTAALGCLVKDYFPEPVTVSWNSGALTSGVHTFPAVLQSSGLYSLSSVVTVPSSSLGTQTYICNVNHKPSNTKVDKRVEPKSCDKTHTCPPCPAPELLGGPSVFLFPPKPKDTLMISRTPEVTCVVVDVSHEDPEVKFNWYVDGVEVHNAKTKPREEQYNSTYRVVSVLTVLHQDWLNGKEYKCKVSNKALPAPIEKTISKAKGQPREPQVYTLPPSREEMTKNQVSLTCLVKGFYPSDIAVEWESNGQPENNYKTTPPVLDSDGSFFLYSKLTVDKSRWQQGNVFSCSVLHEALHSHYTQKSLSLSPGK

SEQ ID NO: 2655 - DNA, 1374 bp, synthetic construct
  misc_feature 1..1374: note = Description of Artificial Sequence: Synthetic polynucleotide
  source 1..1374: mol_type = other DNA
caagtgcaactccagcagtcaggaccggggttggtcaagccttcgcagaccctgtccctcacttgcgccattagcggagattcggtgtcgtcgtcgtcagccgcctggaactggattagacagtccccttcccgagggctggagtggctgggccacatcggataccgcagcaagtggtacaacgaatacgccgtcagcgtgaagtcacgcatcaccatcaacccggatactagcaagaaccagttcagcctccagttgaactccgtgaccccggaggataccgccgtgtactactgtgcgcggggcatgtacggatccgtgccgtacaaggagggatactacttcgacatttggggccaggggactcttgtcaccgtgtcctcggcctccactaagggcccgtcagtgttcccccttgcgccatcctcgaagtcaacctccggaggaactgccgcactgggttgcctcgtgaaagactatttcccggaacccgtcactgtctcctggaactcaggagcgctcaccagcggagtgcatacctttcctgcggtgctgcagtccagcggcctgtactccctgagctccgtcgtgaccgtcccctcgtcgtccctgggaacccaaacctacatttgcaacgtcaatcacaagccaagcaacactaaggtggacaagagagtggagcccaagtcctgcgataagacccacacctgtcctccctgtccggcacctgaactgcttggtggaccttccgtgttcctgttcccgcccaagccaaaagacaccctgatgatctcccgcactccggaagtcacttgcgtggtcgtggacgtgtcccacgaggaccccgaggtcaagtttaattggtacgtggacggagtggaagtgcacaacgccaagaccaagccgcgggaagaacagtacaactccacctaccgcgtggtgtccgtcctgactgtgctccaccaggactggctgaacggaaaggagtacaagtgcaaagtgtccaacaaggcactgccagcccctatcgaaaagactatctccaaggccaagggccaacctagggagccccaggtgtacacgttgcctccttcccgcgaagaaatgactaagaaccaggtgtcgctgacctgtctcgtgaaagggttctacccctctgacatcgccgtggaatgggagtcaaacggacagcctgagaacaactataagaccacaccacctgtcctggactccgacggctccttcttcctgtactcaaagttgaccgtggacaagtcgcggtggcaacagggcaacgtgttctcttgctccgtgctgcacgaagccctgcacagccactacacccaaaagtcgctcagcctctcccccggaaag

SEQ ID NO: 2656 - protein, 458 aa, synthetic construct
  REGION 1..458: note = Description of Artificial Sequence: Synthetic polypeptide
QVQLQQSGPGLVKPSQTLSLTCAISGDSVSSSSAAWNWIRQSPSRGLEWLGHIGYRSKWYNEYAVSVKSRITINPDTSKNQFSLQLNSVTPEDTAVYYCARGMYGSVPYKEGYYFDIWGQGTLVTVSSASTKGPSVFPLAPSSKSTSGGTAALGCLVKDYFPEPVTVSWNSGALTSGVHTFPAVLQSSGLYSLSSVVTVPSSSLGTQTYICNVNHKPSNTKVDKRVEPKSCDKTHTCPPCPAPELLGGPSVFLFPPKPKDTLMISRTPEVTCVVVAVSHEDPEVKFNWYVDGVEVHNAKTKPREEQYNSTYRVVSVLTVLHQDWLNGKEYKCKVSNKALAAPIEKTISKAKGQPREPQVYTLPPSREEMTKNQVSLTCLVKGFYPSDIAVEWESNGQPENNYKTTPPVLDSDGSFFLYSKLTVDKSRWQQGNVFSCSVLHEALHSHYTQKSLSLSPGK

SEQ ID NO: 2657 - DNA, 1374 bp, synthetic construct
  misc_feature 1..1374: note = Description of Artificial Sequence: Synthetic polynucleotide
  source 1..1374: mol_type = other DNA
caagtgcaactccagcagtcaggaccggggttggtcaagccttcgcagaccctgtccctcacttgcgccattagcggagattcggtgtcgtcgtcgtcagccgcctggaactggattagacagtccccttcccgagggctggagtggctgggccacatcggataccgcagcaagtggtacaacgaatacgccgtcagcgtgaagtcacgcatcaccatcaacccggatactagcaagaaccagttcagcctccagttgaactccgtgaccccggaggataccgccgtgtactactgtgcgcggggcatgtacggatccgtgccgtacaaggagggatactacttcgacatttggggccaggggactcttgtcaccgtgtcctcggcctccactaagggcccgtcagtgttcccccttgcgccatcctcgaagtcaacctccggaggaactgccgcactgggttgcctcgtgaaagactatttcccggaacccgtcactgtctcctggaactcaggagcgctcaccagcggagtgcatacctttcctgcggtgctgcagtccagcggcctgtactccctgagctccgtcgtgaccgtcccctcgtcgtccctgggaacccaaacctacatttgcaacgtcaatcacaagccaagcaacactaaggtggacaagagagtggagcccaagtcctgcgataagacccacacctgtcctccctgtccggcacctgaactgcttggtggaccttccgtgttcctgttcccgcccaagccaaaagacaccctgatgatctcccgcactccggaagtcacttgcgtggtcgtggccgtgtcccacgaggaccccgaggtcaagtttaattggtacgtggacggagtggaagtgcacaacgccaagaccaagccgcgggaagaacagtacaactccacctaccgcgtggtgtccgtcctgactgtgctccaccaggactggctgaacggaaaggagtacaagtgcaaagtgtccaacaaggcactggctgcccctatcgaaaagactatctccaaggccaagggccaacctagggagccccaggtgtacacgttgcctccttcccgcgaagaaatgactaagaaccaggtgtcgctgacctgtctcgtgaaagggttctacccctctgacatcgccgtggaatgggagtcaaacggacagcctgagaacaactataagaccacaccacctgtcctggactccgacggctccttcttcctgtactcaaagttgaccgtggacaagtcgcggtggcaacagggcaacgtgttctcttgctccgtgctgcacgaagccctgcacagccactacacccaaaagtcgctcagcctctcccccggaaag

SEQ ID NO: 2658 - protein, 458 aa, synthetic construct
  REGION 1..458: note = Description of Artificial Sequence: Synthetic polypeptide
QVQLQQSGPGLVKPSQTLSLTCAISGDSVSSSSAAWNWIRQSPSRGLEWLGHIGYRSKWYNEYAVSVKSRITINPDTSKNQFSLQLNSVTPEDTAVYYCARGMYGSVPYKEGYYFDIWGQGTLVTVSSASTKGPSVFPLAPSSKSTSGGTAALGCLVKDYFPEPVTVSWNSGALTSGVHTFPAVLQSSGLYSLSSVVTVPSSSLGTQTYICNVNHKPSNTKVDKRVEPKSCDKTHTCPPCPAPELLGGPSVFLFPPKPKDTLYITREPEVTCVVVDVSHEDPEVKFNWYVDGVEVHNAKTKPREEQYNSTYRVVSVLTVLHQDWLNGKEYKCKVSNKALPAPIEKTISKAKGQPREPQVYTLPPSREEMTKNQVSLTCLVKGFYPSDIAVEWESNGQPENNYKTTPPVLDSDGSFFLYSKLTVDKSRWQQGNVFSCSVMHEALHNHYTQKSLSLSPGK

SEQ ID NO: 2659 - DNA, 1374 bp, synthetic construct
  misc_feature 1..1374: note = Description of Artificial Sequence: Synthetic polynucleotide
  source 1..1374: mol_type = other DNA
caagtgcaactccagcagtcaggaccggggttggtcaagccttcgcagaccctgtccctcacttgcgccattagcggagattcggtgtcgtcgtcgtcagccgcctggaactggattagacagtccccttcccgagggctggagtggctgggccacatcggataccgcagcaagtggtacaacgaatacgccgtcagcgtgaagtcacgcatcaccatcaacccggatactagcaagaaccagttcagcctccagttgaactccgtgaccccggaggataccgccgtgtactactgtgcgcggggcatgtacggatccgtgccgtacaaggagggatactacttcgacatttggggccaggggactcttgtcaccgtgtcctcggcctccactaagggcccgtcagtgttcccccttgcgccatcctcgaagtcaacctccggaggaactgccgcactgggttgcctcgtgaaagactatttcccggaacccgtcactgtctcctggaactcaggagcgctcaccagcggagtgcatacctttcctgcggtgctgcagtccagcggcctgtactccctgagctccgtcgtgaccgtcccctcgtcgtccctgggaacccaaacctacatttgcaacgtcaatcacaagccaagcaacactaaggtggacaagagagtggagcccaagtcctgcgataagacccacacctgtcctccctgtccggcacctgaactgcttggtggaccttccgtgttcctgttcccgcccaagccaaaagacaccctgtatatcactcgcgaaccggaagtcacttgcgtggtcgtggacgtgtcccacgaggaccccgaggtcaagtttaattggtacgtggacggagtggaagtgcacaacgccaagaccaagccgcgggaagaacagtacaactccacctaccgcgtggtgtccgtcctgactgtgctccaccaggactggctgaacggaaaggagtacaagtgcaaagtgtccaacaaggcactgccagcccctatcgaaaagactatctccaaggccaagggccaacctagggagccccaggtgtacacgttgcctccttcccgcgaagaaatgactaagaaccaggtgtcgctgacctgtctcgtgaaagggttctacccctctgacatcgccgtggaatgggagtcaaacggacagcctgagaacaactataagaccacaccacctgtcctggactccgacggctccttcttcctgtactcaaagttgaccgtggacaagtcgcggtggcaacagggcaacgtgttctcttgctccgtgatgcacgaagccctgcacaaccactacacccaaaagtcgctcagcctctcccccggaaag

SEQ ID NO: 2660 - protein, 9 aa, synthetic construct
  REGION 1..9: note = Description of Artificial Sequence: Synthetic peptide
QQHGHSPTT

SEQ ID NO: 2661 - protein, 6 aa, synthetic construct
  REGION 1..6: note = Description of Artificial Sequence: Synthetic peptide
HGHSPT

SEQ ID NO: 2662 - protein, 107 aa, synthetic construct
  REGION 1..107: note = Description of Artificial Sequence: Synthetic polypeptide
DIQMTQSPSSLSASVGDRVTITCRASQDISNYLAWYQQKPGKAPKLLIYRASSLQSGVPSRFSGSGSGTDFTLTISSLQPEDFATYYCQQHGHSPTTFGQGTKVEIK

SEQ ID NO: 2663 - DNA, 321 bp, synthetic construct
  misc_feature 1..321: note = Description of Artificial Sequence: Synthetic polynucleotide
  source 1..321: mol_type = other DNA
gatatccagatgacccagagcccgagcagcctgagcgccagcgtgggcgatcgcgtgaccattacctgcagagccagccaggacatttctaactacctggcttggtaccagcagaaaccgggcaaagcgccgaaactattaatctaccgtgcttcttctctgcaaagcggcgtgccgagccgctttagcggcagcggatccggcaccgatttcaccctgaccattagctctctgcaaccggaagactttgcgacctattattgccagcagcatggtcattctccgactacctttggccagggcacgaaagttgaaattaaa

SEQ ID NO: 2664 - protein, 214 aa, synthetic construct
  REGION 1..214: note = Description of Artificial Sequence: Synthetic polypeptide
DIQMTQSPSSLSASVGDRVTITCRASQDISNYLAWYQQKPGKAPKLLIYRASSLQSGVPSRFSGSGSGTDFTLTISSLQPEDFATYYCQQHGHSPTTFGQGTKVEIKRTVAAPSVFIFPPSDEQLKSGTASVVCLLNNFYPREAKVQWKVDNALQSGNSQESVTEQDSKDSTYSLSSTLTLSKADYEKHKVYACEVTHQGLSSPVTKSFNRGEC

SEQ ID NO: 2665 - DNA, 642 bp, synthetic construct
  misc_feature 1..642: note = Description of Artificial Sequence: Synthetic polynucleotide
  source 1..642: mol_type = other DNA
gatatccagatgacccagagcccgagcagcctgagcgccagcgtgggcgatcgcgtgaccattacctgcagagccagccaggacatttctaactacctggcttggtaccagcagaaaccgggcaaagcgccgaaactattaatctaccgtgcttcttctctgcaaagcggcgtgccgagccgctttagcggcagcggatccggcaccgatttcaccctgaccattagctctctgcaaccggaagactttgcgacctattattgccagcagcatggtcattctccgactacctttggccagggcacgaaagttgaaattaaacgtacggtggccgctcccagcgtgttcatcttcccccccagcgacgagcagctgaagagcggcaccgccagcgtggtgtgcctgctgaacaacttctacccccgggaggccaaggtgcagtggaaggtggacaacgccctgcagagcggcaacagccaggaaagcgtcaccgagcaggacagcaaggactccacctacagcctgagcagcaccctgaccctgagcaaggccgactacgagaagcacaaggtgtacgcctgcgaggtgacccaccagggcctgtccagccccgtgaccaagagcttcaaccggggcgagtgt

SEQ ID NO: 2666 - protein, 12 aa, synthetic construct
  REGION 1..12: note = Description of Artificial Sequence: Synthetic peptide
GFSLSTSGVGVS

SEQ ID NO: 2667 - protein, 16 aa, synthetic construct
  REGION 1..16: note = Description of Artificial Sequence: Synthetic peptide
LIFSDHDKIYSTSLKT

SEQ ID NO: 2668 - protein, 11 aa, synthetic construct
  REGION 1..11: note = Description of Artificial Sequence: Synthetic peptide
TLIDRSVYFDY

SEQ ID NO: 2669 - protein, 7 aa, synthetic construct
  REGION 1..7: note = Description of Artificial Sequence: Synthetic peptide
TSGVGVS

SEQ ID NO: 2670 - protein, 9 aa, synthetic construct
  REGION 1..9: note = Description of Artificial Sequence: Synthetic peptide
GFSLSTSGV

SEQ ID NO: 2671 - protein, 5 aa, synthetic construct
  REGION 1..5: note = Description of Artificial Sequence: Synthetic peptide
FSDHD

SEQ ID NO: 2672 - protein, 10 aa, synthetic construct
  REGION 1..10: note = Description of Artificial Sequence: Synthetic peptide
GFSLSTSGVG

SEQ ID NO: 2673 - protein, 7 aa, synthetic construct
  REGION 1..7: note = Description of Artificial Sequence: Synthetic peptide
IFSDHDK

SEQ ID NO: 2674 - protein, 13 aa, synthetic construct
  REGION 1..13: note = Description of Artificial Sequence: Synthetic peptide
ARTLIDRSVYFDY

SEQ ID NO: 2675 - protein, 121 aa, synthetic construct
  REGION 1..121: note = Description of Artificial Sequence: Synthetic polypeptide
QVQLKESGPALVKPTQTLTLTCTFSGFSLSTSGVGVSWIRQPPGKALEWLALIFSDHDKIYSTSLKTRLTISKDTSKNQVVLTMTNMDPVDTATYYCARTLIDRSVYFDYWGQGTLVTVSS

SEQ ID NO: 2676 - DNA, 363 bp, synthetic construct
  misc_feature 1..363: note = Description of Artificial Sequence: Synthetic polynucleotide
  source 1..363: mol_type = other DNA
caggtgcaattgaaagaaagcggtccggcgctggtgaaaccgacccagaccctgaccctgacgtgcaccttttccggattcagcctgtctacttccggtgttggtgtgagctggattcgccagccgccgggcaaagcgctcgagtggctggcgctgatcttctctgaccatgacaagatctatagcaccagcctgaaaacccgtctgaccattagcaaagatacttcgaaaaaccaggtggtgctgaccatgaccaacatggacccggtggataccgcgacctattattgcgcgcgtactctgatcgaccgttctgtttacttcgattactggggccaaggcaccctggtgactgttagctca

SEQ ID NO: 2677 - protein, 451 aa, synthetic construct
  REGION 1..451: note = Description of Artificial Sequence: Synthetic polypeptide
QVQLKESGPALVKPTQTLTLTCTFSGFSLSTSGVGVSWIRQPPGKALEWLALIFSDHDKIYSTSLKTRLTISKDTSKNQVVLTMTNMDPVDTATYYCARTLIDRSVYFDYWGQGTLVTVSSASTKGPSVFPLAPSSKSTSGGTAALGCLVKDYFPEPVTVSWNSGALTSGVHTFPAVLQSSGLYSLSSVVTVPSSSLGTQTYICNVNHKPSNTKVDKRVEPKSCDKTHTCPPCPAPEAAGGPSVFLFPPKPKDTLMISRTPEVTCVVVDVSHEDPEVKFNWYVDGVEVHNAKTKPREEQYNSTYRVVSVLTVLHQDWLNGKEYKCKVSNKALPAPIEKTISKAKGQPREPQVYTLPPSREEMTKNQVSLTCLVKGFYPSDIAVEWESNGQPENNYKTTPPVLDSDGSFFLYSKLTVDKSRWQQGNVFSCSVMHEALHNHYTQKSLSLSPGK

SEQ ID NO: 2678 - DNA, 1353 bp, synthetic construct
  misc_feature 1..1353: note = Description of Artificial Sequence: Synthetic polynucleotide
  source 1..1353: mol_type = other DNA
caggtgcaattgaaagaaagcggtccggcgctggtgaaaccgacccagaccctgaccctgacgtgcaccttttccggattcagcctgtctacttccggtgttggtgtgagctggattcgccagccgccgggcaaagcgctcgagtggctggcgctgatcttctctgaccatgacaagatctatagcaccagcctgaaaacccgtctgaccattagcaaagatacttcgaaaaaccaggtggtgctgaccatgaccaacatggacccggtggataccgcgacctattattgcgcgcgtactctgatcgaccgttctgtttacttcgattactggggccaaggcaccctggtgactgttagctcagcctccaccaagggtccatcggtcttccccctggcaccctcctccaagagcacctctgggggcacagcggccctgggctgcctggtcaaggactacttccccgaaccggtgacggtgtcgtggaactcaggcgccctgaccagcggcgtgcacaccttcccggctgtcctacagtcctcaggactctactccctcagcagcgtggtgaccgtgccctccagcagcttgggcacccagacctacatctgcaacgtgaatcacaagcccagcaacaccaaggtggacaagagagttgagcccaaatcttgtgacaaaactcacacatgcccaccgtgcccagcacctgaagcagcggggggaccgtcagtcttcctcttccccccaaaacccaaggacaccctcatgatctcccggacccctgaggtcacatgcgtggtggtggacgtgagccacgaagaccctgaggtcaagttcaactggtacgtggacggcgtggaggtgcataatgccaagacaaagccgcgggaggagcagtacaacagcacgtaccgggtggtcagcgtcctcaccgtcctgcaccaggactggctgaatggcaaggagtacaagtgcaaggtctccaacaaagccctcccagcccccatcgagaaaaccatctccaaagccaaagggcagccccgagaaccacaggtgtacaccctgcccccatcccgggaggagatgaccaagaaccaggtcagcctgacctgcctggtcaaaggcttctatcccagcgacatcgccgtggagtgggagagcaatgggcagccggagaacaactacaagaccacgcctcccgtgctggactccgacggctccttcttcctctacagcaagctcaccgtggacaagagcaggtggcagcaggggaacgtcttctcatgctccgtgatgcatgaggctctgcacaaccactacacgcagaagagcctctccctgtctccgggtaaa

SEQ ID NO: 2679 - protein, 13 aa, synthetic construct
  REGION 1..13: note = Description of Artificial Sequence: Synthetic peptide
SGSSSNIGHHYVS

SEQ ID NO: 2680 - protein, 7 aa, synthetic construct
  REGION 1..7: note = Description of Artificial Sequence: Synthetic peptide
DNTNRPS

SEQ ID NO: 2681 - protein, 11 aa, synthetic construct
  REGION 1..11: note = Description of Artificial Sequence: Synthetic peptide
ATWDGLMNSIV

SEQ ID NO: 2682 - protein, 9 aa, synthetic construct
  REGION 1..9: note = Description of Artificial Sequence: Synthetic peptide
SSSNIGHHY

SEQ ID NO: 2683 - skipped

SEQ ID NO: 2684 - protein, 8 aa, synthetic construct
  REGION 1..8: note = Description of Artificial Sequence: Synthetic peptide
WDGLMNSI

SEQ ID NO: 2685 - protein, 8 aa, synthetic construct
  REGION 1..8: note = Description of Artificial Sequence: Synthetic peptide
SSNIGHHY

SEQ ID NO: 2686 - protein, 110 aa, synthetic construct
  REGION 1..110: note = Description of Artificial Sequence: Synthetic polypeptide
DIVLTQPPSVSGAPGQRVTISCSGSSSNIGHHYVSWYQQLPGTAPKLLIYDNTNRPSGVPDRFSGSKSGTSASLAITGLQAEDEADYYCATWDGLMNSIVFGGGTKLTVL

SEQ ID NO: 2687 - DNA, 330 bp, synthetic construct
  misc_feature 1..330: note = Description of Artificial Sequence: Synthetic polynucleotide
  source 1..330: mol_type = other DNA
gatatcgtgctgacccagccgccgagcgtgagcggtgcaccgggccagcgcgtgaccattagctgtagcggcagcagcagcaacattggtcatcattacgtgtcttggtaccagcagctgccgggcacggcgccgaaactgctgatctacgacaacactaaccgcccgagcggcgtgccggatcgctttagcggatccaaaagcggcaccagcgccagcctggcgattaccggcctgcaagcagaagacgaagcggattattactgcgctacttgggacggtctgatgaactctatcgtgtttggcggcggcacgaagttaaccgtccta

SEQ ID NO: 2688 - protein, 216 aa, synthetic construct
  REGION 1..216: note = Description of Artificial Sequence: Synthetic polypeptide
DIVLTQPPSVSGAPGQRVTISCSGSSSNIGHHYVSWYQQLPGTAPKLLIYDNTNRPSGVPDRFSGSKSGTSASLAITGLQAEDEADYYCATWDGLMNSIVFGGGTKLTVLGQPKAAPSVTLFPPSSEELQANKATLVCLISDFYPGAVTVAWKADSSPVKAGVETTTPSKQSNNKYAASSYLSLTPEQWKSHRSYSCQVTHEGSTVEKTVAPTECS

SEQ ID NO: 2689 - DNA, 648 bp, synthetic construct
  misc_feature 1..648: note = Description of Artificial Sequence: Synthetic polynucleotide
  source 1..648: mol_type = other DNA
gatatcgtgctgacccagccgccgagcgtgagcggtgcaccgggccagcgcgtgaccattagctgtagcggcagcagcagcaacattggtcatcattacgtgtcttggtaccagcagctgccgggcacggcgccgaaactgctgatctacgacaacactaaccgcccgagcggcgtgccggatcgctttagcggatccaaaagcggcaccagcgccagcctggcgattaccggcctgcaagcagaagacgaagcggattattactgcgctacttgggacggtctgatgaactctatcgtgtttggcggcggcacgaagttaaccgtcctaggtcagcccaaggctgccccctcggtcactctgttcccgccctcctctgaggagcttcaagccaacaaggccacactggtgtgtctcataagtgacttctacccgggagccgtgacagtggcctggaaggcagatagcagccccgtcaaggcgggagtggagaccaccacaccctccaaacaaagcaacaacaagtacgcggccagcagctatctgagcctgacgcctgagcagtggaagtcccacagaagctacagctgccaggtcacgcatgaagggagcaccgtggagaagacagtggcccctacagaatgttca

SEQ ID NO: 2690 - protein, 118 aa, synthetic construct
  REGION 1..118: note = Description of Artificial Sequence: Synthetic polypeptide
EVKLLDSGGGLVQAGGSLRLSCAGSGFTFTDFYMSWIRQPPGKAPEWLGVIRNKANGYTAGYNPSVKGRFTISRDNTQNILYLQMNTLRAEDTAIYYCARLSYGFDYWGQGVMVTVSS

SEQ ID NO: 2691 - protein, 112 aa, synthetic construct
  REGION 1..112: note = Description of Artificial Sequence: Synthetic polypeptide
DIVMTQGALPNPVPSGESASITCQSSKSLLHSNGKTYLNWYLQRPGQSPQLLIYWMSTRASGVSDRFSGSGSGTDFTLKISSVEAEDVGVYYCQQFLEFPFTFGSGTKLEIK

SEQ ID NO: 2692 - protein, 10 aa, synthetic construct
  REGION 1..10: note = Description of Artificial Sequence: Synthetic peptide
GFTFTDFYMS

SEQ ID NO: 2693 - protein, 19 aa, synthetic construct
  REGION 1..19: note = Description of Artificial Sequence: Synthetic peptide
VIRNKANGYTAGYNPSVKG

SEQ ID NO: 2694 - protein, 9 aa, synthetic construct
  REGION 1..9: note = Description of Artificial Sequence: Synthetic peptide
ARLSYGFDY

SEQ ID NO: 2695 - protein, 16 aa, synthetic construct
  REGION 1..16: note = Description of Artificial Sequence: Synthetic peptide
QSSKSLLHSNGKTYLN

SEQ ID NO: 2696 - protein, 7 aa, synthetic construct
  REGION 1..7: note = Description of Artificial Sequence: Synthetic peptide
WMSTRAS

SEQ ID NO: 2697 - protein, 9 aa, synthetic construct
  REGION 1..9: note = Description of Artificial Sequence: Synthetic peptide
QQFLEFPFT

SEQ ID NO: 2698 - protein, 118 aa, synthetic construct
  REGION 1..118: note = Description of Artificial Sequence: Synthetic polypeptide
EVKLLESGGGLVQPGGSLRLSCAASGFTFTNFYMSWIRQPPGRAPEWLGVIRNRPNGYTTDYNPSVKGRFTISRDNTQNILYLQMSTLRADDTAFYYCTRLTYGFDYWGQGVMVTVSS

SEQ ID NO: 2699 - protein, 112 aa, synthetic construct
  REGION 1..112: note = Description of Artificial Sequence: Synthetic polypeptide
DIVMTQGALPNPVPSGESASITCQSSKSLLHSNGKTYLNWYLQRPGQSPQLLIYWMSTRASGVSDRFSGSGSGTDFTLKISSVEAEVVGVYYCQQFLEFPFTFGSGTKLEIK

SEQ ID NO: 2700 - protein, 10 aa, synthetic construct
  REGION 1..10: note = Description of Artificial Sequence: Synthetic peptide
GFTFTNFYMS

SEQ ID NO: 2701 - protein, 19 aa, synthetic construct
  REGION 1..19: note = Description of Artificial Sequence: Synthetic peptide
VIRNRPNGYTTDYNPSVKG

SEQ ID NO: 2702 - protein, 9 aa, synthetic construct
  REGION 1..9: note = Description of Artificial Sequence: Synthetic peptide
TRLTYGFDY

SEQ ID NO: 2703 - protein, 118 aa, synthetic construct
  REGION 1..118: note = Description of Artificial Sequence: Synthetic polypeptide
EVKLLDSGGGLVQAGGSLRLSCAGSGFTFTDFYMSWIRQPPGKAPEWLGVIRNKANGYTAGYNPSVKGRFTISRDNTQNILYLQMNTLRAEDTAIYYCARLTYGFDYWGQGVMVTVSS

SEQ ID NO: 2704 - protein, 112 aa, synthetic construct
  REGION 1..112: note = Description of Artificial Sequence: Synthetic polypeptide
DIVMTQGALPNPVPSGESASITCQSSKSLLHSNGKTYLNWYLQRPGQSPQLLIYWMSTRASGVSDRFSGSGSGTDFTLKISSVEAEDVGVYYCQQFLEYPFTFGSGTKLEIK

SEQ ID NO: 2705 - protein, 9 aa, synthetic construct
  REGION 1..9: note = Description of Artificial Sequence: Synthetic peptide
ARLTYGFDY

SEQ ID NO: 2706 - protein, 9 aa, synthetic construct
  REGION 1..9: note = Description of Artificial Sequence: Synthetic peptide
QQFLEYPFT

SEQ ID NO: 2707 - protein, 118 aa, synthetic construct
  REGION 1..118: note = Description of Artificial Sequence: Synthetic polypeptide
EVQLVESGGGLVQPGGSLRLSCAASGFTFTDFYMSWVRQAPGKGLEWVSVIRNKANGYTAGYNPSVKGRFTISRDNSKNTLYLQMNSLRAEDTAVYYCARLTYGFDYWGQGTLVTVSS

SEQ ID NO: 2708 - protein, 112 aa, synthetic construct
  REGION 1..112: note = Description of Artificial Sequence: Synthetic polypeptide
DIVMTQTPLSLPVTPGEPASISCQSSKSLLHSNGKTYLNWYLQKPGQSPQLLIYWMSTRASGVPDRFSGSGSGTDFTLKISRVEAEDVGVYYCQQFLEYPFTFGQGTKVEIK

SEQ ID NO: 2709 - protein, 118 aa, synthetic construct
  REGION 1..118: note = Description of Artificial Sequence: Synthetic polypeptide
EVQLVESGGGLVQPGGSLRLSCAGSGFTFTDFYMSWVRQAPGKGLEWVSVIRNKANGYTAGYNPSVKGRFTISRDNSKNTLYLQMNSLRAEDTAVYYCARLTYGFDYWGQGTLVTVSS

SEQ ID NO: 2710 - protein, 112 aa, synthetic construct
  REGION 1..112: note = Description of Artificial Sequence: Synthetic polypeptide
DIVMTQTPLSLPVTPGEPASISCQSSKSLLHSTGKTYLNWYLQKPGQSPQLLIYWMSTRASGVPDRFSGSGSGTDFTLKISRVEAEDVGVYYCQQFLEYPFTFGQGTKVEIK

SEQ ID NO: 2711 - protein, 16 aa, synthetic construct
  REGION 1..16: note = Description of Artificial Sequence: Synthetic peptide
QSSKSLLHSTGKTYLN

SEQ ID NO: 2712 - protein, 118 aa, synthetic construct
  REGION 1..118: note = Description of Artificial Sequence: Synthetic polypeptide
EVQLVESGGGLVQPGGSLRLSCAASGFTFTDFYMSWVRQAPGKGLEWVSVIRNKANAYTAGYNPSVKGRFTISRDNSKNTLYLQMNSLRAEDTAVYYCARLTYGFDYWGQGTLVTVSS

SEQ ID NO: 2713 - protein, 19 aa, synthetic construct
  REGION 1..19: note = Description of Artificial Sequence: Synthetic peptide
VIRNKANAYTAGYNPSVKG

SEQ ID NO: 2714 - protein, 118 aa, synthetic construct
  REGION 1..118: note = Description of Artificial Sequence: Synthetic polypeptide
EVQLVESGGGLVQPGGSLRLSCAGSGFTFTDFYMSWVRQAPGKGPEWLSVIRNKANAYTAGYNPSVKGRFTISRDNSKNTLYLQMNSLRAEDTAVYYCARLTYGFDYWGQGTLVTVSS

SEQ ID NO: 2715 - protein, 120 aa, synthetic construct
  REGION 1..120: note = Description of Artificial Sequence: Synthetic polypeptide
EVQLQQSGAELVRSGASVKLSCTASGFSIEDFYIHWVKQRPEQGLEWIGWIDPENGDSKYAPKFQGKATMTADTSSNTAYLHLSSLTSEDTAVYYCHADHGNYGSTMDYWGQGTSVTVSS

SEQ ID NO: 2716 - protein, 107 aa, synthetic construct
  REGION 1..107: note = Description of Artificial Sequence: Synthetic polypeptide
DIQMNQSPSSLSASLGDTVTITCHASQHINVWLSWYQQKPGDHPKLLIYKASNLHTGVPSRFSGSGSGTGFTLTISSLQPEDIATYYCQQGQTYPRTFGGGTKLEIK

SEQ ID NO: 2717 - protein, 10 aa, synthetic construct
  REGION 1..10: note = Description of Artificial Sequence: Synthetic peptide
GFSIEDFYIH

SEQ ID NO: 2718 - protein, 17 aa, synthetic construct
  REGION 1..17: note = Description of Artificial Sequence: Synthetic peptide
WIDPENGDSKYAPKFQG

SEQ ID NO: 2719 - protein, 13 aa, synthetic construct
  REGION 1..13: note = Description of Artificial Sequence: Synthetic peptide
HADHGNYGSTMDY

SEQ ID NO: 2720 - protein, 11 aa, synthetic construct
  REGION 1..11: note = Description of Artificial Sequence: Synthetic peptide
HASQHINVWLS

SEQ ID NO: 2721 - protein, 7 aa, synthetic construct
  REGION 1..7: note = Description of Artificial Sequence: Synthetic peptide
KASNLHT

SEQ ID NO: 2722 - protein, 9 aa, synthetic construct
  REGION 1..9: note = Description of Artificial Sequence: Synthetic peptide
QQGQTYPRT

SEQ ID NO: 2723 - protein, 120 aa, synthetic construct
  REGION 1..120: note = Description of Artificial Sequence: Synthetic polypeptide
QVQLVQSGAEVKKPGASVKVSCKASGFSIEDFYIHWVRQAPGQGLEWMGWIDPENGDSKYAPKFQGRATITADTSTSTAYMELSSLRSEDTAVYYCHADHGNYGSTMDYWGQGTLVTVSS

SEQ ID NO: 2724 - protein, 107 aa, synthetic construct
  REGION 1..107: note = Description of Artificial Sequence: Synthetic polypeptide
DIQMTQSPSSLSASVGDRVTITCHASQHINVWLSWYQQKPGKAPKLLIYKASNLHTGVPSRFSGSGSGTDFTLTISSLQPEDFATYYCQQGQTYPRTFGQGTKVEIK

SEQ ID NO: 2725 - protein, 120 aa, synthetic construct
  REGION 1..120: note = Description of Artificial Sequence: Synthetic polypeptide
QVQLVQSGAEVKKPGASVKVSCKASGFSIEDFYIHWVRQAPGQGLEWMGWIDPENGDSKYAPKFQGRVTITADTSTSTAYMELSSLRSEDTAVYYCHADHGNYGSTMDYWGQGTLVTVSS

SEQ ID NO: 2726 - protein, 120 aa, synthetic construct
  REGION 1..120: note = Description of Artificial Sequence: Synthetic polypeptide
QVQLVQSGAEVKKPGASVKVSCKASGFSIEDFYIHWVRQAPGQGLEWMGWIDPEQGDSKYAPKFQGRATITADTSTSTAYMELSSLRSEDTAVYYCHADHGNYGSTMDYWGQGTLVTVSS

SEQ ID NO: 2727 - protein, 17 aa, synthetic construct
  REGION 1..17: note = Description of Artificial Sequence: Synthetic peptide
WIDPEQGDSKYAPKFQG

SEQ ID NO: 2728 - protein, 120 aa, synthetic construct
  REGION 1..120: note = Description of Artificial Sequence: Synthetic polypeptide
QVQLVQSGAEVKKPGASVKVSCKASGFSIEDFYIHWVRQAPGQGLEWMGWIDPENGESKYAPKFQGRATITADTSTSTAYMELSSLRSEDTAVYYCHADHGNYGSTMDYWGQGTLVTVSS

SEQ ID NO: 2729 - protein, 17 aa, synthetic construct
  REGION 1..17: note = Description of Artificial Sequence: Synthetic peptide
WIDPENGESKYAPKFQG

SEQ ID NO: 2730 - protein, 120 aa, synthetic construct
  REGION 1..120: note = Description of Artificial Sequence: Synthetic polypeptide
QVQLVQSGAEVKKPGASVKVSCKASGFSIEDFYIHWVRQAPGQGLEWMGWIDPEQGESKYAPKFQGRATITADTSTSTAYMELSSLRSEDTAVYYCHADHGNYGSTMDYWGQGTLVTVSS

SEQ ID NO: 2731 - protein, 17 aa, synthetic construct
  REGION 1..17: note = Description of Artificial Sequence: Synthetic peptide
WIDPEQGESKYAPKFQG

SEQ ID NO: 2732 - protein, 120 aa, synthetic construct
  REGION 1..120: note = Description of Artificial Sequence: Synthetic polypeptide
QVQLVQSGAEVKKPGASVKVSCKASGFSIEDFYIHWVRQAPGQGLEWMGWIDPEQGDSKYAPKFQGRVTITADTSTSTAYMELSSLRSEDTAVYYCHADHGNYGSTMDYWGQGTLVTVSS

SEQ ID NO: 2733 - protein, 120 aa, synthetic construct
  REGION 1..120: note = Description of Artificial Sequence: Synthetic polypeptide
QVQLVQSGAEVKKPGASVKVSCKASGFSIEDFYIHWVRQAPGQGLEWMGWIDPENGESKYAPKFQGRVTITADTSTSTAYMELSSLRSEDTAVYYCHADHGNYGSTMDYWGQGTLVTVSS

SEQ ID NO: 2734 - protein, 120 aa, synthetic construct
  REGION 1..120: note = Description of Artificial Sequence: Synthetic polypeptide
QVQLVQSGAEVKKPGASVKVSCKASGFSIEDFYIHWVRQAPGQGLEWMGWIDPEQGESKYAPKFQGRVTITADTSTSTAYMELSSLRSEDTAVYYCHADHGNYGSTMDYWGQGTLVTVSS

SEQ ID NO: 2735 - protein, 17 aa, synthetic construct
  REGION 1..17: note = Description of Artificial Sequence: Synthetic peptide
  VARIANT 6: note = Asn or Gln
  VARIANT 8: note = Asp or Glu
WIDPEXGXSKYAPKFQG

SEQ ID NO: 2736 - protein, 10 aa, synthetic construct
  REGION 1..10: note = Description of Artificial Sequence: Synthetic peptide
  VARIANT 6: note = Asp or Asn
GFTFTBFYMS

SEQ ID NO: 2737 - protein, 19 aa, synthetic construct
  REGION 1..19: note = Description of Artificial Sequence: Synthetic peptide
  VARIANT 5: note = Lys or Arg
  VARIANT 6: note = Ala or Pro
  VARIANT 8: note = Gly or Ala
  VARIANT 11: note = Ala or Thr
  VARIANT 12: note = Gly or Asp
VIRNXXNXYTXXYNPSVKG

SEQ ID NO: 2738 - protein, 9 aa, synthetic construct
  REGION 1..9: note = Description of Artificial Sequence: Synthetic peptide
  VARIANT 1: note = Ala or Thr
  VARIANT 4: note = Thr or Ser
XRLXYGFDY

SEQ ID NO: 2739 - protein, 16 aa, synthetic construct
  REGION 1..16: note = Description of Artificial Sequence: Synthetic peptide
  VARIANT 10: note = Asn or Thr
QSSKSLLHSXGKTYLN

SEQ ID NO: 2740 - protein, 9 aa, synthetic construct
  REGION 1..9: note = Description of Artificial Sequence: Synthetic peptide
  VARIANT 6: note = Tyr or Phe
QQFLEXPFT

SEQ ID NO: 2741 - protein, 112 aa, synthetic construct
  REGION 1..112: note = Description of Artificial Sequence: Synthetic polypeptide
DIVMTQSPDSLAVSLGERATINCQSSKSLLHSNGKTYLNWYQQKPGQPPKLLIYWMSTRASGVPDRFSGSGSGTDFTLTISSLQAEDVAVYYCQQFLEFPFTFGQGTKVEIK

SEQ ID NO: 2742 - protein, 7 aa, synthetic construct
  REGION 1..7: note = Description of Artificial Sequence: Synthetic peptide
FPGESES

SEQ ID NO: 2743 - protein, 9 aa, synthetic construct
  REGION 1..9: note = Description of Artificial Sequence: Synthetic peptide
GEKGPCQRV

SEQ ID NO: 2744 - protein, 12 aa, synthetic construct
  REGION 1..12: note = Description of Artificial Sequence: Synthetic peptide
TLRNLQPHDAGL

SEQ ID NO: 2745 - protein, 4 aa, synthetic construct
  REGION 1..4: note = Description of Artificial Sequence: Synthetic peptide
VEVL

SEQ ID NO: 2746 - protein, 107 aa, synthetic construct; identical to SEQ ID NO: 60
  REGION 1..107: note = Description of Artificial Sequence: Synthetic polypeptide

SEQ ID NO: 2747 - protein, 123 aa, synthetic construct; identical to SEQ ID NO: 123
  REGION 1..123: note = Description of Artificial Sequence: Synthetic polypeptide

SEQ ID NO: 2748 - protein, 107 aa, synthetic construct; identical to SEQ ID NO: 61
  REGION 1..107: note = Description of Artificial Sequence: Synthetic polypeptide

SEQ ID NO: 2749 - protein, 123 aa, synthetic construct; identical to SEQ ID NO: 124
  REGION 1..123: note = Description of Artificial Sequence: Synthetic polypeptide

SEQ ID NO: 2750 - protein, 112 aa, synthetic construct; identical to SEQ ID NO: 1819
  REGION 1..112: note = Description of Artificial Sequence: Synthetic polypeptide

SEQ ID NO: 2751 - protein, 123 aa, synthetic construct; identical to SEQ ID NO: 1766
  REGION 1..123: note = Description of Artificial Sequence: Synthetic polypeptide

SEQ ID NO: 2752 - protein, 118 aa, synthetic construct
  REGION 1..118: note = Description of Artificial Sequence: Synthetic polypeptide
EVQLVESGGGLVQPGGSLRLSCAGSGFTFTDFYMSWVRQAPGKGPEWLSVIRNKANGYTAGYNPSVKGRFTISRDNSKNTLYLQMNSLRAEDTAVYYCARLTYGFDYWGQGTLVTVSS

SEQ ID NO: 2753 - protein, 10 aa, synthetic construct
  REGION 1..10: note = Description of Artificial Sequence: Synthetic peptide
  REGION 1..10: note = Antibody 1 CDR-H1
GFSFNTYWIG

SEQ ID NO: 2754 - protein, 17 aa, synthetic construct
  REGION 1..17: note = Description of Artificial Sequence: Synthetic peptide
  REGION 1..17: note = Antibody 1 CDR-H2
IIYPGDQDIRYSPSFQG

SEQ ID NO: 2755 - protein, 18 aa, synthetic construct
  REGION 1..18: note = Description of Artificial Sequence: Synthetic peptide
  REGION 1..18: note = Antibody 1 CDR-H3
ARYGRYIYGYGGYHGMDV

SEQ ID NO: 2756 - protein, 11 aa, synthetic construct
  REGION 1..11: note = Description of Artificial Sequence: Synthetic peptide
  REGION 1..11: note = Antibody 1 CDR-L1
RASQAIRDDLG

SEQ ID NO: 2757 - protein, 8 aa, synthetic construct
  REGION 1..8: note = Description of Artificial Sequence: Synthetic peptide
  REGION 1..8: note = Antibody 1 CDR-L2
YAASSLQS

SEQ ID NO: 2758 - protein, 9 aa, synthetic construct
  REGION 1..9: note = Description of Artificial Sequence: Synthetic peptide
  REGION 1..9: note = Antibody 1 CDR-L3
LQNYNYPHT

SEQ ID NO: 2759 - protein, 125 aa, synthetic construct
  REGION 1..125: note = Description of Artificial Sequence: Synthetic polypeptide
  REGION 1..125: note = Antibody 1 VH
EVQLVQSGAEVKKPGESLKISCKGSGFSFNTYWIGWVRQMPGKGLEWMGIIYPGDQDIRYSPSFQGQVTISADKSISTAYLQWSSLKASDTAMYYCARYGRYIYGYGGYHGMDVWGQGTTVTVSS

SEQ ID NO: 2760 - protein, 107 aa, synthetic construct
  REGION 1..107: note = Description of Artificial Sequence: Synthetic polypeptide
  REGION 1..107: note = Antibody 1 VL
DIQMTQSPSSLSASVGDRVTITCRASQAIRDDLGWYQQKPGKAPKLLIYAASSLQSGVPSRFSGSGSGTDFTLTISSLQPEDFATYYCLQNYNYPHTFGQGTKLEIK

SEQ ID NO: 2761 - protein, 451 aa, synthetic construct
  REGION 1..451: note = Description of Artificial Sequence: Synthetic polypeptide
  REGION 1..451: note = Antibody 1 Heavy Chain
EVQLVQSGAEVKKPGESLKISCKGSGFSFNTYWIGWVRQMPGKGLEWMGIIYPGDQDIRYSPSFQGQVTISADKSISTAYLQWSSLKASDTAMYYCARYGRYIYGYGGYHGMDVWGQGTTVTVSSASTKGPSVFPLAPCSRSTSESTAALGCLVKDYFPEPVTVSWNSGALTSGVHTFPAVLQSSGLYSLSSVVTVPSSSLGTKTYTCNVDHKPSNTKVDKRVESKYGPPCPPCPAPEAAGGPSVFLFPPKPKDTLMISRTPEVTCVVVDVSQEDPEVQFNWYVDGVEVHNAKTKPREEQFNSTYRVVSVLTVLHQDWLNGKEYKCKVSNKGLPSSIEKTISKAKGQPREPQVYTLPPSQEEMTKNQVSLTCLVKGFYPSDIAVEWESNGQPENNYKTTPPVLDSDGSFFLYSRLTVDKSRWQEGNVFSCSVMHEALHNHYTQKSLSLSLG

SEQ ID NO: 2762 - protein, 214 aa, synthetic construct
  REGION 1..214: note = Description of Artificial Sequence: Synthetic polypeptide
  REGION 1..214: note = Antibody 1 Light Chain
DIQMTQSPSSLSASVGDRVTITCRASQAIRDDLGWYQQKPGKAPKLLIYAASSLQSGVPSRFSGSGSGTDFTLTISSLQPEDFATYYCLQNYNYPHTFGQGTKLEIKRTVAAPSVFIFPPSDEQLKSGTASVVCLLNNFYPREAKVQWKVDNALQSGNSQESVTEQDSKDSTYSLSSTLTLSKADYEKHKVYACEVTHQGLSSPVTKSFNRGEC

SEQ ID NO: 2763 - protein, 162 aa, synthetic construct
  REGION 1..162: note = Description of Artificial Sequence: Synthetic polypeptide
  REGION 1..162: note = Human TREM2 ECD-His
HNTTVFQGVAGQSLQVSCPYDSMKHWGRRKAWCRQLGEKGPCQRVVSTHNLWLLSFLRRWNGSTAITDDTLGGTLTITLRNLQPHDAGLYQCQSLHGSEADTLRKVLVEVLADPLDHRDAGDLWFPGESESFEDAHVEHSISRSLLEGEIPFPPTSHHHHHH

SEQ ID NO: 2764 - protein, 159 aa, synthetic construct
  REGION 1..159: note = Description of Artificial Sequence: Synthetic polypeptide
  REGION 1..159: note = Mouse TREM2 ECD-His
LNTTVLQGMAGQSLRVSCTYDALKHWGRRKAWCRQLGEEGPCQRVVSTHGVWLLAFLKKRNGSTVIADDTLAGTVTITLKNLQAGDAGLYQCQSLRGREAEVLQKVLVEVLEDPLDDQDAGDLWVPEESSSFEGAQVEHSTSRNQETSFPPTSHHHHHH

SEQ ID NO: 2765 - protein, 166 aa, synthetic construct
  REGION 1..166: note = Description of Artificial Sequence: Synthetic polypeptide
  REGION 1..166: note = Rat TREM2 ECD-His
NTTVFQGVAGQSLRVSCPYDSATHWGRRKAWCRQLGEEGPCERVVSTHSWWLLSFLKRRNGSTAITDDALGGTLTVTLRDLQAQDAGVYQCQSLQGREASTLQKILVEVLTEPLEHEHAGDFWVPEESGSFEDPPVERSSSRSPSEGEPSFPPASGGGGQHHHHHH

SEQ ID NO: 2766 - protein, 156 aa, synthetic construct
  REGION 1..156: note = Description of Artificial Sequence: Synthetic polypeptide
  REGION 1..156: note = Rabbit TREM2 ECD-His
NTTVLQGVAGQSLRVSCTYDALRHWGRRKAWCRQLAEEGPCQRVVSTHGVWLLAFLRKQNGSTVITDDTLAGTVTITLRNLQAGDAGLYQCQSLRGREAEVLQKVVVEVLEDPLDDQDAGDLWVPEESESFEGAQVEHSTSRSQSGGGGQHHHHHH

SEQ ID NO: 2767 - protein, 168 aa, synthetic construct
  REGION 1..168: note = Description of Artificial Sequence: Synthetic polypeptide
  REGION 1..168: note = Cynomolgus monkey TREM2 ECD-His
HNTTVFQGVEGQSLQVSCPYDSMKHWGRRKAWCRQLGEKGPCQRVVSTHNLWLLSFLRRRNGSTAITDDTLGGTLTITLRNLQPHDAGFYQCQSLHGSEADTLRKVLVEVLADPLDHRDAGDLWVPGESESFEDAHVEHSISRPSQGSHLPSCLSKEGGGGQHHHHHH

SEQ ID NO: 2768 - protein, 220 aa, synthetic construct
  REGION 1..220: note = Description of Artificial Sequence: Synthetic polypeptide
  REGION 1..220: note = 24G6-1 (SST28347-1) LC
DIVMTQSPDSLAVSLGERATINCKSSQSVLYSSNNKHFLAWYQQKPGQPPKLLIYWASTRESGVPDRFSGSGSGTDFTLTISSLQAEDVAVYYCQQYYSTPLTFGGGTKVEIKRTVAAPSVFIFPPSDEQLKSGTASVVCLLNNFYPREAKVQWKVDNALQSGNSQESVTEQDSKDSTYSLSSTLTLSKADYEKHKVYACEVTHQGLSSPVTKSFNRGEC

SEQ ID NO: 2769 - protein, 449 aa, synthetic construct
  REGION 1..449: note = Description of Artificial Sequence: Synthetic polypeptide
  REGION 1..449: note = 24G6-1 (SST28347-1) HC
EVQLLESGGGLVQPGGSLRLSCAASGFTFSSYAMSWVRQAPGKGLEWVSAISGSGGSTYYAESVKGRFTISRDNSKNTLYLQMNSLRAEDTAVYYCAKAYTPMAFFDYWGQGTLVTVSSASTKGPSVFPLAPSSKSTSGGTAALGCLVKDYFPEPVTVSWNSGALTSGVHTFPAVLQSSGLYSLSSVVTVPSSSLGTQTYICNVNHKPSNTKVDKKVEPKSCDKTHTCPPCPAPELLGGPSVFLFPPKPKDTLMISRTPEVTCVVVDVSHEDPEVKFNWYVDGVEVHNAKTKPCEEQYGSTYRCVSVLTVLHQDWLNGKEYKCKVSNKALPAPIEKTISKAKGQPREPQVYTLPPSREEMTKNQVSLTCLVKGFYPSDIAVEWESNGQPENNYKTTPPVLDSDGSFFLYSKLTVDKSRWQQGNVFSCSVMHEALHNHYTQKSLSLSPGK

SEQ ID NO: 2770 - protein, 445 aa, synthetic construct
  REGION 1..445: note = Description of Artificial Sequence: Synthetic polypeptide
  REGION 1..445: note = 24G6-1 (SST28347-1) HC
EVQLLESGGGLVQPGGSLRLSCAASGFTFSSYAMSWVRQAPGKGLEWVSAISGSGGSTYYAESVKGRFTISRDNSKNTLYLQMNSLRAEDTAVYYCAKAYTPMAFFDYWGQGTLVTVSSASTKGPSVFPLAPSSRSTSESTAALGCLVKDYFPEPVTVSWNSGALTSGVHTFPAVLQSSGLYSLSSVVTVPSSNFGTQTYTCNVDHKPSNTKVDKTVERKCCVECPPCPAPELLGGPSVFLFPPKPKDTLMISRTPEVTCVVVDVSHEDPEVKFNWYVDGVEVHNAKTKPCEEQYGSTYRCVSVLTVLHQDWLNGKEYKCKVSNKALPAPIEKTISKAKGQPREPQVYTLPPSREEMTKNQVSLTCLVKGFYPSDIAVEWESNGQPENNYKTTPPVLDSDGSFFLYSKLTVDKSRWQQGNVFSCSVMHEALHNHYTQKSLSLSPG

SEQ ID NO: 2771 - protein, 214 aa, synthetic construct
  REGION 1..214: note = Description of Artificial Sequence: Synthetic polypeptide
  REGION 1..214: note = 6E7-1 (SST29857-1) LC
DIQMTQSPSSVSASVGDRVTITCRASQGISSWLAWYQQKPGKAPKLLIYAASSLQSGVPSRFSGSGSGTDFTLTISSLQPEDFATYFCQQADAFPRTFGQGTKLEIKRTVAAPSVFIFPPSDEQLKSGTASVVCLLNNFYPREAKVQWKVDNALQSGNSQESVTEQDSKDSTYSLSSTLTLSKADYEKHKVYACEVTHQGLSSPVTKSFNRGEC

SEQ ID NO: 2772 - protein, 449 aa, synthetic construct
  REGION 1..449: note = Description of Artificial Sequence: Synthetic polypeptide
  REGION 1..449: note = 6E7-1 (SST29857-1) HC
EVQLVQSGAEVKKPGESLKISCKGSGYSFTSYWIAWVRQMPGKGLEWMGIIYPGDADARYSPSFQGQVTISADKSISTAYLQWSSLKASDTAMYFCARQRTFYYDSSDYFDYWGQGTLVTVSSASTKGPSVFPLAPSSRSTSESTAALGCLVKDYFPEPVTVSWNSGALTSGVHTFPAVLQSSGLYSLSSVVTVPSSNFGTQTYTCNVDHKPSNTKVDKTVERKCCVECPPCPAPELLGGPSVFLFPPKPKDTLMISRTPEVTCVVVDVSHEDPEVKFNWYVDGVEVHNAKTKPCEEQYGSTYRCVSVLTVLHQDWLNGKEYKCKVSNKALPAPIEKTISKAKGQPREPQVYTLPPSREEMTKNQVSLTCLVKGFYPSDIAVEWESNGQPENNYKTTPPVLDSDGSFFLYSKLTVDKSRWQQGNVFSCSVMHEALHNHYTQKSLSLSPG

SEQ ID NO: 2773 - protein, 214 aa, synthetic construct
  REGION 1..214: note = Description of Artificial Sequence: Synthetic polypeptide
  REGION 1..214: note = 13E7-1 (SST202443-1) LC
EIVMTQSPATLSVSPGERATLSCRASQSVSSNLAWFQQKPGQAPRLLIYGASTRATGIPARFSGSGSGTEFTLTISSLQPEDFAVYYCLQDNNFPPTFGQGTKVDIKRTVAAPSVFIFPPSDEQLKSGTASVVCLLNNFYPREAKVQWKVDNALQSGNSQESVTEQDSKDSTYSLSSTLTLSKADYEKHKVYACEVTHQGLSSPVTKSFNRGEC

SEQ ID NO: 2774 - protein, 450 aa, synthetic construct
  REGION 1..450: note = Description of Artificial Sequence: Synthetic polypeptide
  REGION 1..450: note = 13E7-1 (SST202443-1) HC
EVQLVQSGAEVKKPGESLKISCKGSGYSFTSYWIGWVRQMPGKGLEWMGIIYPGDADARYSPSFQGQVTISADKSISTAYLQWSSLKASDTAMYFCARRRQGIFGDALDFWGQGTLVTVSSASTKGPSVFPLAPSSKSTSGGTAALGCLVKDYFPEPVTVSWNSGALTSGVHTFPAVLQSSGLYSLSSVVTVPSSSLGTQTYICNVNHKPSNTKVDKKVEPKSCDKTHTCPPCPAPELLGGPSVFLFPPKPKDTLMISRTPEVTCVVVDVSHEDPEVKFNWYVDGVEVHNAKTKPCEEQYGSTYRCVSVLTVLHQDWLNGKEYKCKVSNKALPAPIEKTISKAKGQPREPQVYTLPPSREEMTKNQVSLTCLVKGFYPSDIAVEWESNGQPENNYKTTPPVLDSDGSFFLYSKLTVDKSRWQQGNVFSCSVMHEALHNHYTQKSLSLSPG

SEQ ID NO: 2775 - protein, 214 aa, synthetic construct
  REGION 1..214: note = Description of Artificial Sequence: Synthetic polypeptide
  REGION 1..214: note = 5E3-1 (SST29825-1) LC
DIQMTQSPSSLSASVGDRVTITCRASQGISNYLAWYQQKPGKAPKSLIYAASSLQSGVPSRFSGSGSGTDFTLTISSLQPEDFATYYCQQYSTYPFTFGQGTKVDIKRTVAAPSVFIFPPSDEQLKSGTASVVCLLNNFYPREAKVQWKVDNALQSGNSQESVTEQDSKDSTYSLSSTLTLSKADYEKHKVYACEVTHQGLSSPVTKSFNRGEC

SEQ ID NO: 2776 - protein, 447 aa, synthetic construct
  REGION 1..447: note = Description of Artificial Sequence: Synthetic polypeptide
  REGION 1..447: note = 5E3-1 (SST29825-1) HC
QVQLVQSGAEVKKPGASVKVSCKASGYTFTGYYIHWVRQAPGQGLEWMGWINPYSGGTTSAQKFQGRVTMTRDTSTSSAYMELSRLRSDDTAVYYCARDAGYLALYGTDVWGQGTLVTVSSASTKGPSVFPLAPSSRSTSESTAALGCLVKDYFPEPVTVSWNSGALTSGVHTFPAVLQSSGLYSLSSVVTVPSSNFGTQTYTCNVDHKPSNTKVDKTVERKCCVECPPCPAPELLGGPSVFLFPPKPKDTLMISRTPEVTCVVVDVSHEDPEVKFNWYVDGVEVHNAKTKPCEEQYGSTYRCVSVLTVLHQDWLNGKEYKCKVSNKALPAPIEKTISKAKGQPREPQVYTLPPSREEMTKNQVSLTCLVKGFYPSDIAVEWESNGQPENNYKTTPPVLDSDGSFFLYSKLTVDKSRWQQGNVFSCSVMHEALHNHYTQKSLSLSPG

SEQ ID NO: 2777 - protein, 214 aa, synthetic construct; identical to SEQ ID NO: 2773
  REGION 1..214: note = Description of Artificial Sequence: Synthetic polypeptide
  REGION 1..214: note = 13E7 Variant LC

SEQ ID NO: 2778 - protein, 451 aa, synthetic construct
  REGION 1..451: note = Description of Artificial Sequence: Synthetic polypeptide
  REGION 1..451: note = 13E7 Variant HC
EVQLVQSGAEVKKPGESLKISCKGSGYSFTSYWIGWVRQMPGKGLEWMGIIYPGDADARYSPSFQGQVTISADKSISTAYLQWSSLKASDTAMYFCARRRQGIFGDALDFWGQGTLVTVSSASTKGPSVFPLAPSSKSTSGGTAALGCLVKDYFPEPVTVSWNSGALTSGVHTFPAVLQSSGLYSLSSVVTVPSSSLGTQTYICNVNHKPSNTKVDKKVEPKSCDKTHTCPPCPAPELLGGPSVFLFPPKPKDTLMISRTPEVTCVVVDVSHEDPEVKFNWYVDGVEVHNAKTKPCEEQYGSTYRCVSVLTVLHQDWLNGKEYKCKVSNKALPAPIEKTISKAKGQPREPQVYTLPPSREEMTKNQVSLTCLVKGFYPSDIAVEWESNGQPENNYKTTPPVLDSDGSFFLYSKLTVDKSRWQQGNVFSCSVMHEALHNHYTQKSLSLSPGK

SEQ ID NO: 2779 - protein, 445 aa, synthetic construct
  REGION 1..445: note = Description of Artificial Sequence: Synthetic polypeptide
  REGION 1..445: note = Murinized Ab-3 HC
EVQLVQSGAEVKKPGESLKISCKGSGYSFTSYWIGWVRQMPGKGLEWMGIIYPGDADARYSPSFQGQVTISADKSISTAYLQWSSLKASDTAMYFCARRRQGIFGDALDFWGQGTLVTVSSAKTTPPSVYPLAPGSAAQTNSMVTLGCLVKGYFPEPVTVTWNSGSLSSGVHTFPAVLQSDLYTLSSSVTVPSSTWPSETVTCNVAHPASSTKVDKKIVPRDCGCKPCICTVPEVSSVFIFPPKPKDVLTITLTPKVTCVVVDISKDDPEVQFSWFVDDVEVHTAQTQPREEQFGSTFRSVSELPIMHQDWLNGKEFKCRVNSAAFPAPIEKTISKTKGRPKAPQVYTIPPPKEQMAKDKVSLTCMITDFFPEDITVEWQWNGQPAENYKNTQPIMDTDGSYFVYSKLNVQKSNWEAGNTFTCSVLHEGLHNHHTEKSLSHSPGK

SEQ ID NO: 2780 - protein, 214 aa, synthetic construct
  REGION 1..214: note = Description of Artificial Sequence: Synthetic polypeptide
  REGION 1..214: note = Murinized Ab-2/Ab-3 LC
EIVMTQSPATLSVSPGERATLSCRASQSVSSNLAWFQQKPGQAPRLLIYGASTRATGIPARFSGSGSGTEFTLTISSLQPEDFAVYYCLQDNNFPPTFGQGTKVDIKRADAAPTVSIFPPSSEQLTSGGASVVCFLNNFYPKDINVKWKIDGSERQNGVLNSWTDQDSKDSTYSMSSTLTLTKDEYERHNSYTCEATHKTSTSPIVKSFNRNEC

SEQ ID NO: 2781 - protein, 445 aa, synthetic construct
  REGION 1..445: note = Description of Artificial Sequence: Synthetic polypeptide
  REGION 1..445: note = Murinized Ab-2 HC
EVQLVQSGAEVKKPGESLKISCKGSGYSFTSYWIGWVRQMPGKGLEWMGIIYPGDADARYSPSFQGQVTISADKSISTAYLQWSSLKASDTAMYFCARRRQGIFGDALDFWGQGTLVTVSSAKTTPPSVYPLAPGSAAQTNSMVTLGCLVKGYFPEPVTVTWNSGSLSSGVHTFPAVLQSDLYTLSSSVTVPSSPRPSETVTCNVAHPASSTKVDKKIVPRDCGCKPCICTVPEVSSVFIFPPKPKDVLTITLTPKVTCVVVDISKDDPEVQFSWFVDDVEVHTAQTQPREEQFNSTFRSVSELPIMHQDWLNGKEFKCRVNSAAFPAPIEKTISKTKGRPKAPQVYTIPPPKEQMAKDKVSLTCMITDFFPEDITVEWQWNGQPAENYKNTQPIMNTNGSYFVYSKLNVQKSNWEAGNTFTCSVLHEGLHNHHTEKSLSHSPGK
